(19) United States
(12) Patent Application Publication
(10) Pub. No.: US 2016/0186263 A1
(43) Pub. Date: Jun. 30, 2016

(54) USING PLEXIN-A4 AS A BIOMARKER AND THERAPEUTIC TARGET FOR ALZHEIMER'S DISEASE

(71) Applicant: TRUSTEES OF BOSTON UNIVERSITY, Boston, MA (US)

(72) Inventors: Lindsay A. FARRER, Wayland, MA (US); Gyungah JUN, Malden, MA (US)

(21) Appl. No.: 14/889,565

(22) PCT Filed: May 9, 2014
(86) PCT No.: PCT/US2014/037479

§ 371 Date: Nov. 6, 2015

Related U.S. Application Data
(60) Provisional application No. 61/821,397, filed on May 9, 2013.

(51) Int. Cl. C12Q 1/68; C12N 15/113

(52) U.S. Cl. CPC C12Q 1/6883; C12N 15/1138; C12Q 2600/158; C12Q 2600/156; C12Q 2600/118; C12N 2320/34

(57) ABSTRACT

The present disclosure provides methods, assays and systems for detecting an increased risk for Alzheimer's disease (AD) in a subject by identifying at least one nucleic acid polymorphism described herein in a biological sample from the subject. Levels of the genes associated with the nucleic acid polymorphism described herein are also determined for detection of higher risk for AD. Disclosure further provides methods for treating AD by administering to a subject in need thereof a TS1 PLXNA4 inhibitory agent.

### RELATED APPLICATIONS

[0001] This application claims benefit under 35 U.S.C. §119(e) of the U.S. Provisional Application No. 61/821,397, filed May 9, 2013, the content of which is incorporated herein by reference in its entirety.

### GOVERNMENT SUPPORT

[0002] This invention was made with Government Support under Contract No.: AG25259 awarded by the National Institutes of Health. The Government has certain rights in the invention.

### TECHNICAL FIELD

[0003] The present invention relates generally to assays, methods, and systems for diagnosing Alzheimer's disease (AD). The invention further relates to methods and compositions for treatment of AD.

### BACKGROUND

[0004] Alzheimer's disease is a leading cause of dementia in the elderly, affecting 5-10% of the population over the age of 65 years (A Guide to Understanding Alzheimer's Disease and Related Disorders, Jorm, ed., New York University Press, New York, 1987). In Alzheimer's disease, the parts of the brain essential for cognitive processes such as memory, attention, language, and reasoning degenerate, robbing victims of much that makes us human, including independence. In some forms of Alzheimer's disease, onset can first be seen in middle age, but more commonly, symptoms appear from the 65 and onwards. Alzheimer's disease today affects 4-5 million Americans, with slightly more than half of these people receiving care at home, while the others are in many different health care institutions. The prevalence of Alzheimer's disease and other dementias doubles every 5 years beyond the age of 65, and recent studies indicate that nearly 50% of all people age 85 and older have symptoms of Alzheimer's disease (1999 Progress Report on Alzheimer's Disease, National Institute on Aging/National Institute of Health). 13% (33 million people) of the total population of the United States are age 65 and older, and this percentage will climb to 20% by the year 2025 (1999 Progress Report on Alzheimer's Disease).

[0005] Alzheimer's disease also puts a heavy economic burden on society. A recent study estimated that the cost of caring for one Alzheimer's disease patient with severe cognitive impairments at home or in a nursing home, is more than $47,000 per year (A Guide to Understanding Alzheimer's Disease and Related Disorders). For a disease that can span from 2 to 20 years, the overall cost of Alzheimer's disease to families and to society is staggering. The annual economic toll of Alzheimer's disease in the United States in terms of health care expenses and lost wages of both patients and their caregivers is estimated at $80 to $100 billion (1999 Progress Report on Alzheimer's disease).

### SUMMARY

[0006] Provided herein are several applications involving methods and assays comprising PLXNA4. In some aspects, provided herein are methods of treating Alzheimer disease (AD) by inhibiting phosphorylation of tau inhibitor via inhibition of PLXNA4 or one of its ligands including, but not limited to, SEMA3. In some aspects, PLXNA4 can be used as a biomarker by measuring the expression levels of the full-length and shorter PLXNA4 isoforms in serum or by genotyping PLXNA4 single nucleotide polymorphisms (SNPs) that are genetically associated with AD including, but not limited to, rs277470, rs277472, rs277473, rs277474, rs277476, rs277477, rs277478, rs277479, rs277480, rs277481, rs277483, rs277484, rs10234979, rs9641933, rs10225863, rs7799929, rs9656410, rs11764790, rs4731860, rs11763817, rs13231950, rs11773243, rs17166338, rs11773724, rs17818325, rs10236235, rs965800, rs10244929, rs4481530, rs1593222, rs1424590, rs1364505, rs6959579, and rs11761937. As such, a PLXNA4 biomarker can be used for predictive testing for future development of AD and for classifying subjects enrolled in clinical trials as having high or low risk of developing AD.

[0007] As described herein, association of Alzheimer's disease with 341,492 genotyped single nucleotide polymorphisms (SNPs) was evaluated in the Framingham Heart Study (FHS) cohort comprising 61 incident cases and 2,530 cognitively normal individuals using an approach that accounts for family structure. Top-ranked SNPs were genotyped in a replication cohort containing 1,840 cases and 1,969 unaffected individuals in the National Institute on Aging Late Onset Alzheimer Disease (NIA-LOAD) Study.

[0008] As described herein, genome-wide significant associations were identified in the FHS with moderately rare SNPs in ITIH3 (rs9311482, p=4.6×10⁻⁹), PLXNA4 (rs277484) p=9.0×10⁻¹° and MY018B (rs13057714, p=8.9×10⁻⁹). As demonstrated herein, ten PLXNA4 SNPs were significant in NIA-LOAD after multiple testing correction in a propensity score model which conditioned on parental affection status and onset age (rs11761937, p=5.8×10⁻⁶). Transfection of SH-SY5Y cells or primary rat neurons with the full-length PLXNA4 isoform (TS1) increased tau phosphorylation and formation of neurofibrillary tangles when stimulated by semaphorin-3A, whereas the opposite effect was observed when transfected with shorter isoforms (TS2 and TS3). Transfection of any isoform into HEK293 cells did not affect APP processing or Aβ production. Late-stage AD cases (n=9) compared to controls (n=5) had 1.9-fold increased expression of TS1 in cortical brain tissue (P=1.6×10⁻⁴). Risk alleles from several AD-associated SNPs were significantly correlated with elevated expression of TS1 and TS3 in serum from 116 population controls.

[0009] The data reported herein shows that PLXNA4-mediated tau phosphorylation is an independent upstream event leading to AD-related tangle formation in neurons, and that this process is modulated by the level of the TS1 and TS3 isoforms. The results reported herein also show that reduced expression of PLXNA4, for example the TS1 isoform in particular, in brain is crucial to healthy neurons. The results described herein further show that PLXNA4 has a role in AD pathogenesis through isoform-specific effects on tau phosphorylation. Thus, without wishing to be bound by a theory, PLXNA4 or its binding partners can be used as novel drug targets for AD, as well as markers in assays for classifying and identifying subjects at risk for Alzheimer's disease, such as serum-based assays.

[0010] Accordingly, provided herein, in some aspects are assays using PLXNA4 as a biomarker in serum, assays and methods using PLXNA4 variants for predictive testing or stratification of subjects in clinical trials and for treatment purposes, and PLXNA4 variants, and their binding partners, as targets in methods for treatment of Alzheimer's disease.

[0011] In one aspect provided herein are assays and methods for determining an increased risk for developing AD in a subject. In one aspect, the assay and method comprise (a) transforming a biological sample from the subject into at least one detectable target loci for a nucleic acid polymorphism, wherein the target locus is selected from: SNP rs277472, SNP rs10236235, and SNP rs11761937; and (b) detecting presence or absence of at least one (e.g., one, two, three or more) AD risk associated SNPs from the at least one detectable target loci. In some embodiments, AD risk associated SNPs include A/A or A/C SNP rs277472, T/T or T/C SNP rs10236235, and C/C or C/A SNP rs11761937.

[0012] Another aspect of the assays and methods for determining an increased risk for developing AD in a subject include measuring the amount of at least one gene associated with the AD risk associated SNPs described herein in a biological sample from the subject, and then comparing the measured amount of the gene to a reference amount. In some embodiments, at least the amount of PLXNA4 gene expression products (e.g., nucleic acid or protein) associated with SNP rs277472, SNP rs10236235, or SNP rs11761937 is measured in a biological sample of a subject and compared to a reference level. In some embodiments, expression of full length isoform 1 (TS1) or shorter isoform 3 (TS3) of PLXNA4 gene expression product is measured. If the amount of the PLXNA4 gene expression products is higher than that of the reference amount, the subject is at increased risk for developing AD. The amount of the PLXNA4 gene expression products can be higher by at least about 10%, at least about 20%, at least about 30%, at least about 40%, at least about 50%, at least about 60%, at least about 70%, at least about 80%, at least about 90%, or at least about 95%, about 98%, about 99% or 100%, or higher than the reference level.

[0013] Without limitations the reference amount can be that measured in a normal healthy subject with no genetic susceptibility for AD. For example, a normal healthy subject that is not a carrier of any of the AD risk associated alleles described herein or is not diagnosed with any forms of AD such as early-onset autosomal-dominant AD, or any neurodegenerative disorders. The reference amount can be from a control sample, a pooled sample of control individuals or a numeric value or range of values based on the same.

[0014] In some embodiments, the invention provides methods or assays for determining if an individual is in need of AD treatment or prevention, comprising the steps of determining if the subject carries any of the SNPs selected from the group consisting of: (i) SNP1 genotype A/A or A/C (or T/T or T/G in the complement) of SEQ ID NO: 1, wherein SNP1 is identified by rs277472 on SEQ ID NO: 1, wherein SEQ ID NO. 1 is a portion of genomic nucleic acid sequence of plexin A4 (PLXNA4); (ii) SNP2 genotype T/T or T/C (or A/A or A/C in the complement) of SEQ ID NO: 1, wherein SNP2 is position 132,006,366 of SEQ ID NO: 1 identified by rs10236235, wherein SEQ ID NO. 1 is a portion of genomic nucleic acid sequence of PLXNA4; (iii) SNP3 genotype C/C or C/A (or G/G or G/T in the complement) of SEQ ID NO: 1, wherein SNP3 identified by rs11761937 on SEQ ID NO: 1, wherein the SEQ ID NO. 1 is a portion of genomic nucleic acid sequence of PLXNA4; and (iv) any combinations thereof. If the subject carries any of the SNPs, then the subject can further be administered a treatment or prevention intervention to treat AD symptoms or inhibit development of AD symptoms. These treatment of prevention interventions include, but are not limited to life style advise, including e.g., prescribing an aerobic exercise regime, dietary advise, including increase in intake of omega-3 fatty acids or reduction of sugar or cholesterol rich food intake to lower cholesterol, and administering pharmaceutical agents effective in prevention or treatment of AD. In some embodiments, the treatment includes administering a therapeutically effective amount of a TS1 PLXNA4 inhibitory agent.

[0015] A further aspect of the invention provides a computer implemented system for determining presence or absence of alleles associated with an increased risk of a subject for developing late onset Alzheimer's disease (AD). The system comprises (a) a determination module configured to identify and detect at least one single nucleotide polymorphism (SNP) in a biological sample of a subject, wherein the SNP is selected from: (i) (i) SNP1 genotype A/A or A/C (or T/T or T/G in the complement) of SEQ ID NO: 1, wherein SNP1 is identified by rs277472 on SEQ ID NO: 1, wherein SEQ ID NO. 1 is a portion of genomic nucleic acid sequence of plexin A4 (PLXNA4); (ii) SNP2 genotype T/T or T/C (or A/A or A/C in the complement) of SEQ ID NO: 1, wherein SNP2 is position 132,006,366 of SEQ ID NO: 1 identified by rs10236235, wherein SEQ ID NO. 1 is a portion of genomic nucleic acid sequence of PLXNA4; (iii) SNP3 genotype C/C or C/A (or G/G or G/T in the complement) of SEQ ID NO: 1, wherein SNP3 identified by rs11761937 on SEQ ID NO: 1, wherein the SEQ ID NO. 1 is a portion of genomic nucleic acid sequence of PLXNA4; and (iv) any combinations thereof; (b) a storage module configured to store output data from the determination module; (c) a computing module adapted to identify whether at least one AD risk associated SNP is present or absent in the output data stored on the storage module; and (d) a display module for displaying if any of the AD risk associated SNP was identified or not. In one embodiment, the display module can display the detected alleles.

[0016] Yet another aspect of the invention relates to a pharmaceutical composition and methods for treating AD in a subject. The method comprises administering to the subject a pharmaceutically acceptable composition comprising a TS1 PLXNA4 inhibitory agent. In some embodiments, the method further comprises diagnosing the individual as having or at risk of AD prior to administering the agent. The diagnosing can be performed, e.g, using the method of determining the level of PLXNA4 (e.g., isoform TS1 or TS3) or by detecting the presence or absence of any one or more of the AD associated SNPs disclosed herein.

[0017] A still yet another aspect of the invention relates to a method for determining if a subject is in need of treatment or prevention for AD. The method comprises the steps of: (a) transforming at least one (e.g., one, two, or three) nucleic acid polymorphism in a locus in a biological sample from the subject into at least one detectable target, wherein the locus is selected from SNP rs277472, SNP rs10236235, or SNP rs11761937; and (b) detecting presence or absence of at least one AD risk associated SNP from the at least one detectable target, wherein detection of the presence of at least one AD risk associated allele is indicative of the subject in need for treatment or prevention for AD. In some embodiments, the method further comprises administering a treatment or preventive intervention to the subject, if presence of at least one AD risk-associated SNP is detected.

[0018] In another aspect, the disclosure provides a assay for identifying a subject having or at risk for Alzheimer's disease. The method comprising measuring or quantifying the expression level or amount of one or both of TS1 and TS3 PLXNA4 transcripts (e.g., mRNA) in a biological sample obtained from the subject and identifying the subject as having or at risk for Alzheimer's disease if the expression level or amount of one or both of TS1 and TS3 PLXNA4 transcript is increased relative to a reference value.

### BRIEF DESCRIPTION OF THE DRAWINGS

[0019] FIGS. 1A-1F show genetic findings in the PLXNA4 region. Regional association plots of genotyped and imputed SNPs from the FHS (1A) and NIA-LOAD (1B) datasets. Most significant SNPs in the FHS (rs277472) and NIA-LOAD (rs11761937) datasets are indicated by purple diamonds. P-values are expressed as −log 10(P) (y-axis) for every tested SNP ordered by chromosomal location (x-axis). Estimates of linkage disequilibrium (r²) of SNPs in this region with the top SNP computed using 1000 Genomes (hg19/November 2010EUR) are shown as circles for r²≧0.8, circles for 0.5≦r²<0.8, circles for 0.2≦r²<0.5, and circles for r²<0.2. (1C) Genomic structure was determined using the NCBI database (Build 37.1). Three validated transcripts (TS1, TS2, and TS3) are shown. Top association signals are highlighted in pink for the FHS dataset and in yellow for the NIA-LOAD dataset. The gene structure and reading frame are indicated with a pink arrow. Exons are denoted with vertical bars on the arrow. Predicted impact of rs277472 (1D) and rs11761937/rs10236235 (1E) on intronic splicing enhancer elements is shown. Protective (left-side nucleotide) and risk (right-side nucleotide) alleles are shown with predicted motifs inside the rectangles. (1F) Diagrams of functional domains encoded by amino acids from the full-length (TS1) and the shorter (TS2 and TS3) transcripts. SEMA: sema_plexinA1 interacting module; PSI: plexin repeat; IPT: three repeats of the binding domains of plexins and cell surface receptors; IPT_PCSR: binding domain of plexins and cell surface receptors (PCSR) and related proteins; TM: transmembrane region; CYTO: cytoplasmic domain. Sequences show in FIG. 1D are (i) GGTCCTCGCCTCC (SEQ ID NO: 2) and (ii) GGTCCTAGCCTCC (SEQ ID NO: 3); in FIG. 1E are (i) GTTTGCCGTGTCG (SEQ ID NO: 4); (i) GTTTGCTGTGTCG (SEQ ID NO: 5); (iii) TCCCAAACTCCTG (SEQ ID NO: 6); and (iv) TCCCAACCTCCTG (SEQ ID NO: 7).

[0020] FIGS. 2A-2C show PLXNA4 isoforms in tau phosphorylation. (2A) SH-SY5Y P301L cells were transfected with the full-length (TS1) or one of the shorter isoforms (TS2 and TS3) of PLXNA4-Myc or empty vectors (pcDNA3.1) with or without 3 nM SEMA3A stimulation for lhr. Whole cell lysates were blotted with AT8, total tau, actin and Myc. Results for the TS2 and TS3 isoforms were similar but only those for TS3 are shown. (2B) 6×His-tagged SEMA3A-Fc was precipitated from media by Protein A/G agarose, and the precipitates were immunoblotted with antibodies to Myc (detecting PLXNA4 isoforms) and 6×His (detecting SEMA3A-FC). (2C) Rat hippocampal neurons were transfected with the full-length or short isoforms of PLXNA-4 Myc with or without 3 nM SEMA3A stimulation for lhr. Cells are immunostained with anti-Myc (green) and AT8 (red). Scale bar represents 10 tm. *p<0.05, **p<0.01, and ***p<0.001, as determined by ANOVA and Tukey post hoc.

[0021] FIGS. 3A-3B show RNA expression of PLXNA4 isoforms. (3A) Normalized mRNA expression of full length isoform 1 (TS1) and shorter isoform 3 (TS3) in brain tissue obtained from five control subjects (mean age at death=80.4+6.3 years) without clinical or pathological evidence of AD and nine patients with autopsy-confirmed AD (mean age at death=91.0+2.2 years). Both isoforms are significantly higher in AD cases than controls (see Table 4). Among controls expression of TS3 is significantly greater (P=0.001). (3B) Normalized mRNA expression levels of TS1 and TS3 according to presence or absence of the AD-associated PLXNA4 SNP rs1593222 risk allele (I) in serum from 116 control subjects. Scale bar represents 10 tm. *p<0.05, **p<0.01, and ***p<0.001, as determined by ANOVA.

[0022] FIGS. 4A-4E show genetic findings in the PLXNA4 region. Regional association plots of genotyped and imputed SNPs from the FHS (4A) and NIA-LOAD (4B) datasets, and in meta-analysis (4C). Most significant SNPs in the FHS (rs277470) and NIA-LOAD (rs12539196) datasets are indicated by purple diamonds. P-values are expressed as −log 10(P) (y-axis) for every tested SNP ordered by chromosomal location (x-axis). Estimates of linkage disequilibrium (r²) of SNPs in this region with the top SNP computed using 1000 Genomes (hg19/November 2010EUR) are shown as orange circles for r²≧0.8, yellow circles for 0.5≦r²<0.8, light blue circles for 0.2≦r²<0.5, and blue circles for r²<0.2. Genomic structure of PLXNA4 was determined using the NCBI database (Build 37.1). (4D) Relative position of the most significantly associated SNPs in FHS and NIA-LOAD datasets in the three validated transcripts (TS1, TS2, and TS3). Exons are denoted with horizontal bars. (4E) Diagrams of functional domains encoded by amino acids from the full-length (TS1) and the shorter (TS2 and TS3) transcripts. SEMA: sema_plexinA1 interacting module (exon 1-4 in TS1 and exon 1-3 in TS2 and TS3); PSI: plexin repeat (exon 4-11 in TS1); IPT: three repeats of the binding domains of plexins and cell surface receptors (exon 11-17 n TS1); PCSR: binding domain of plexins and cell surface receptors (PCSR) and related proteins (exon 17-19 in TS1); TM: transmembrane region (exon 19 in TS1); CYTO: cytoplasmic domain (exon 20-31 in TS1).

[0023] FIG. 5 shows linkage disequilibrium (LD, D′) of top ranked SNPs. LD was calculated in 1000 genomes data from CEU for Caucasian, AFR for African American, and ASN for Japanese populations. Top-ranked SNPs from the PLXNA4 gene: rs277470, rs277472, and rs277484 in FHS; rs12539196 in NIA-LOAD; rs10273901 in ADGC-EA; rs75460865 in ADGC-AA; rs13232207 in ADGC-JPN. The top SNP from the ADGC-AA was monomorphic in both EUR and ASN populations. Five top-ranked SNPs (rs10273901, rs75460865, rs277470, rs277472, and rs277484) from the Caucasian and African American samples were monomorphic in the ASN sample. The top ranked SNPs are located in the SEMA domain, except rs10273901 and rs13232207 which are located in the cytoplasmic domain.

### DETAILED DESCRIPTION

[0024] Embodiments of the various aspects disclosed herein are generally related to assays, methods and systems for identifying a subject with an increased risk for late-onset AD. In one embodiment, the assays, methods and systems are directed to detection of single nucleotide polymorphisms (SNPs) associated with late-onset AD in a biological sample of a subject. In another embodiment, the assays, methods and systems are directed to determination of the expression level of the corresponding SNP gene product in a biological sample of a subject. Another aspect of the invention is directed to methods and pharmaceutical compositions for therapeutic treatment of AD, e.g., by administering aTS1 PLXNA4 inhibitory agent to a subject diagnosed with or at risk of AD.

[0025] In one aspect, the disclosure provides a method for inhibiting progression of AD. The method comprising administering having or at risk for Alzheimer's disease a therapeutically effective amount of a TS1 PLXNA4 inhibitory agent. In some embodiments, the method further comprises assaying a biological sample from the subject for the presence or absence of one or more AD risk associated SNPs before onset of said administering.

[0026] The disclosure also provides a method for inhibiting or reducing neurofibrillary tangles in the brain. The method comprising administering to a subject having or at risk for having neurofibrillary tangles in the brain a therapeutically effective amount of a TS1 PLXNA4 inhibitory agent. In some embodiments, the method further comprises assaying a biological sample from the subject for the presence or absence of one or more AD risk associated SNPs before onset of said administering.

[0027] In another aspect, the disclosure provides a method for inhibiting or reducing tau phosphorylation in the brain. The method comprising administering to a subject a therapeutically effective amount of a TS1 PLXNA4 inhibitory agent. In some embodiments, the method further comprises assaying a biological sample from the subject for the presence or absence of one or more AD risk associated SNPs before onset of said administering.

[0028] As used herein, a TS1 PLXNA4 inhibitory agent, refers to an agent that can inhibit expression and/or activity of the TS1 PLXNA4 isoform. In some embodiments, a TS1 PLXNA4 inhibitory agent can be specific for the TS1 isoform. In some embodiments, a TS1 PLXNA4 inhibitory agent also has some activity against other PLXNA4 isoforms, such as the TS2 and TS2 PLXNA4 isoforms, as described herein.

[0029] The term “agent” or “compound” as used herein, in regard to, for example, a TS1 PLXNA4 inhibitory agent, refers to a chemical entity or biological product, or combination of chemical entities or biological products, administered to a subject to treat or prevent or control a disease or condition. The chemical entity or biological product is preferably, but not necessarily a low molecular weight compound, but may also be a larger compound, or any organic or inorganic molecule effective in the given situation, including modified and unmodified nucleic acids such as antisense nucleic acids, RNAi, such as siRNA or shRNA, peptides, peptidomimetics, receptors, ligands, and antibodies, aptamers, polypeptides, nucleic acid analogues or variants thereof. Examples include an oligomer of nucleic acids, amino acids, or carbohydrates including without limitation proteins, oligonucleotides, ribozymes, DNAzymes, glycoproteins, siRNAs, lipoproteins, aptamers, and modifications and combinations thereof.

[0030] Agents can be selected from a group comprising: chemicals; small molecules; nucleic acid sequences; nucleic acid analogues; proteins; peptides; aptamers; antibodies; or fragments thereof. A nucleic acid sequence can be RNA or DNA, and can be single or double stranded, and can be selected from a group comprising; nucleic acid encoding a protein of interest, oligonucleotides, nucleic acid analogues, for example peptide-nucleic acid (PNA), pseudo-complementary PNA (pc-PNA), locked nucleic acid (LNA), modified RNA (mod-RNA) etc. Such nucleic acid sequences include, for example, but are not limited to, nucleic acid sequence encoding proteins, for example that act as transcriptional repressors, antisense molecules, ribozymes, small inhibitory nucleic acid sequences, for example but are not limited to RNAi, shRNAi, siRNA, micro RNAi (mRNAi), antisense oligonucleotides etc. A protein and/or peptide or fragment thereof can be any protein of interest, for example, but are not limited to: mutated proteins; therapeutic proteins and truncated proteins, wherein the protein is normally absent or expressed at lower levels in the cell. Proteins can also be selected from a group comprising; mutated proteins, genetically engineered proteins, peptides, synthetic peptides, recombinant proteins, chimeric proteins, antibodies, minibodies, minibodies, triabodies, humanized proteins, humanized antibodies, chimeric antibodies, modified proteins and fragments thereof. Alternatively, the agent can be intracellular within the cell as a result of introduction of a nucleic acid sequence into the cell and its transcription resulting in the production of the nucleic acid and/or protein modulator of, for example, a TS1 PLXNA4 transcript, within the cell. In some embodiments, the agent is any chemical, entity or moiety, including without limitation synthetic and naturally-occurring non-proteinaceous entities. In certain embodiments the agent is a small molecule having a chemical moiety. For example, chemical moieties included unsubstituted or substituted alkyl, aromatic, or heterocyclyl moieties including macrolides, leptomycins and related natural products or analogues thereof. Agents can be known to have a desired activity and/or property, or can be selected from a library of diverse compounds.

[0031] In some embodiments, the TS1 PLXNA4 inhibitory agent is an oligonucleotide. In some embodiments, the TS1 PLXNA4 inhibitory agent is an anti-miR, antagomir, antisense oligonucleotide, ribozyme, aptamer, siRNA, shRNA, or RNAi agent.

[0032] In some embodiments, the TS1 PLXNA4 inhibitory agent is an antisense oligonucleotide. One of skill in the art is well aware that single-stranded oligonucleotides can hybridize to a complementary target sequence and prevent access of the translation machinery to the target RNA transcript, thereby preventing protein synthesis. The single-stranded oligonucleotide can also hybridize to a complementary RNA and the RNA target can be subsequently cleaved by an enzyme such as RNase H and thus preventing translation of target RNA. Alternatively, or in addition to, the single-stranded oligonucleotide can modulate the expression of a target sequence via RISC mediated cleavage of the target sequence, i.e., the single-stranded oligonucleotide acts as a single-stranded RNAi agent. A “single-stranded RNAi agent” as used herein, is an RNAi agent which is made up of a single molecule. A single-stranded RNAi agent can include a duplexed region, formed by intra-strand pairing, e.g., it can be, or include, a hairpin or pan-handle structure.

[0033] In some embodiments, the TS1 PLXNA4 inhibitory agent is RNA-interference or RNA interference molecule, including, but not limited to double-stranded RNA, such as siRNA, double-stranded DNA or single-stranded DNA. In some embodiments, an anti-miR-130/301 agent is a single-stranded RNA (ssRNA), a form of RNA endogenously found in eukaryotic cells as the product of DNA transcription. Cellular ssRNA molecules include messenger RNAs (and the progenitor pre-messenger RNAs), small nuclear RNAs, small nucleolar RNAs, transfer RNAs and ribosomal RNAs. Double-stranded RNA (dsRNA) induces a size-dependent immune response such that dsRNA larger than 30 bp activates the interferon response, while shorter dsRNAs feed into the cell's endogenous RNA interference machinery downstream of the Dicer enzyme.

[0034] Numerous specific siRNA molecules have been designed that have been shown to inhibit gene expression (Ratcliff et al. Science 276:1558-1560, 1997; Waterhouse et al. Nature 411:834-842, 2001). In addition, specific siRNA molecules have been shown to inhibit, for example, HIV-1 entry to a cell by targeting the host CD4 protein expression in target cells thereby reducing the entry sites for HIV-1 which targets cells expressing CD4 (Novina et al. Nature Medicine, 8:681-686, 2002). Short interfering RNA have further been designed and successfully used to silence expression of Fas to reduce Fas-mediated apoptosis in vivo (Song et al. Nature Medicine 9:347-351, 2003).

[0035] It has been shown in plants that longer, about 24-26 nt siRNA, correlates with systemic silencing and methylation of homologous DNA. Conversely, the about 21-22 nt short siRNA class correlates with mRNA degradation but not with systemic signaling or methylation (Hamilton et al. EMBO J. 2002 Sep. 2; 21(17):4671-9). These findings reveal an unexpected level of complexity in the RNA silencing pathway in plants that may also apply in animals. In higher order eukaryotes, DNA is methylated at cytosines located 5′ to guanosine in the CpG dinucleotide. This modification has important regulatory effects on gene expression, especially when involving CpG-rich areas known as CpG islands, located in the promoter regions of many genes. While almost all gene-associated islands are protected from methylation on autosomal chromosomes, extensive methylation of CpG islands has been associated with transcriptional inactivation of selected imprinted genes and genes on the inactive X-chromosomes of females. Aberrant methylation of normally unmethylated CpG islands has been documented as a relatively frequent event in immortalized and transformed cells and has been associated with transcriptional inactivation of defined tumor suppressor genes in human cancers. In this last situation, promoter region hypermethylation stands as an alternative to coding region mutations in eliminating tumor suppression gene function (Herman, et al.). The use of siRNA molecules for directing methylation of a target gene is described in U.S. Provisional Application No. 60/447,013, filed Feb. 13, 2003, referred to in U.S. Patent Application Publication No. 20040091918.

[0036] It is also known that the RNA interference does not have to match perfectly to its target sequence. Preferably, however, the 5′ and middle part of the antisense (guide) strand of the siRNA is perfectly complementary to the target nucleic acid sequence.

[0037] The RNA interference-inducing molecule functioning as TS1 PLXNA4 inhibitory agent includes RNA molecules that have natural or modified nucleotides, natural ribose sugars or modified sugars and natural or modified phosphate backbone. Accordingly, the RNA interference-inducing molecules functioning as anti-miR-130/301 agen includes, but are not limited to, unmodified and modified double stranded (ds) RNA molecules including short-temporal RNA (stRNA), small interfering RNA (siRNA), short-hairpin RNA (shRNA), microRNA (miRNA), and double-stranded RNA (dsRNA), (see, e.g. Baulcombe, Science 297:2002-2003, 2002). The dsRNA molecules, e.g. siRNA, also may contain 3′ overhangs, preferably 3′UU or 3′TT overhangs. In one embodiment, the siRNA molecules do not include RNA molecules that comprise ssRNA greater than about 30-40 bases, about 40-50 bases, about 50 bases or more. In one embodiment, the siRNA molecules have a double stranded structure. In one embodiment, the siRNA molecules are double stranded for more than about 25%, more than about 50%, more than about 60%, more than about 70%, more than about 80% or more than about 90% of their length.

[0038] Anti-miRs, including hairpin miRNA inhibitors, are described in detail in Vermeulen et al., “Double-Stranded Regions Are Essential Design Components Of Potent Inhibitors of RISC Function,” RNA 13: 723-730 (2007) and in WO2007/095387 and WO 2008/036825 each of which is incorporated herein by reference in its entirety. A person of ordinary skill in the art can select a sequence from the database for a desired miRNA and design an inhibitor useful for the compositions and methods disclosed herein. Anti-miRs can be used to efficiently silence endogenous miRNAs by forming duplexes comprising the anti-miR and endogenous miRNA, thereby preventing miRNA-induced gene silencing.

[0039] In some embodiments, the TS1 PLXNA4 inhibitory agent is an antagomir. Antagomirs are oligonucleotide anti-miRs that harbor various modifications for RNAse protection and pharmacologic properties, such as enhanced tissue and cellular uptake. They differ from normal RNA by, for example, complete 2′-O-methylation of sugar, phosphorothioate intersugar linkage and, for example, a cholesterol-moiety at 3′-end. In some embodiments, antagomir comprises a 2′-O-methylmodification at all nucleotides, a cholesterol moiety at 3′-end, two phsophorothioate intersugar linkages at the first two positions at the 5′-end and four phosphorothioate linkages at the 3′-end of the molecule. Antagomirs can be used to efficiently silence endogenous miRNAs by forming duplexes comprising the antagomir and endogenous miRNA, thereby preventing miRNA-induced gene silencing. An example of antagomir-mediated miRNA silencing is the silencing of miR-122, described in Krutzfeldt et al, Nature, 2005, 438: 685-689, which is expressly incorporated by reference herein in its entirety.

[0040] In some embodiments, the TS1 PLXNA4 inhibitory agent is ribozyme. In some embodiments, the anti-miR-130/301 agent is ribozyme that cleaves the target microRNA. Ribozymes are oligonucleotides having specific catalytic domains that possess endonuclease activity (Kim and Cech, Proc Natl Acad Sci USA. 1987 December; 84(24):8788-92; Forster and Symons, Cell. 1987 Apr. 24; 49(2):211-20). At least six basic varieties of naturally-occurring enzymatic RNAs are known presently. In general, enzymatic nucleic acids act by first binding to a target RNA. Such binding occurs through the target binding portion of an enzymatic nucleic acid which is held in close proximity to an enzymatic portion of the molecule that acts to cleave the target RNA. Thus, the enzymatic nucleic acid first recognizes and then binds a target RNA through complementary base-pairing, and once bound to the correct site, acts enzymatically to cut the target RNA. Strategic cleavage of such a target RNA will destroy its ability to direct synthesis of an encoded protein. After an enzymatic nucleic acid has bound and cleaved its RNA target, it is released from that RNA to search for another target and can repeatedly bind and cleave new targets. Methods of producing a ribozyme targeted to any target sequence are known in the art. Ribozymes can be designed as described in Int. Pat. Appl. Publ. No. WO 93/23569 and Int. Pat. Appl. Publ. No. WO 94/02595, each specifically incorporated herein by reference, and synthesized to be tested in vitro and in vivo, as described therein.

[0041] Because transcription factors recognize their relatively short binding sequences, even in the absence of surrounding genomic DNA, short oligonucleotides bearing the consensus binding sequence of a specific transcription factor can be used as tools for manipulating gene expression in living cells. This strategy involves the intracellular delivery of such “decoy oligonucleotides”, which are then recognized and bound by the target factor. Occupation of the transcription factor's DNA-binding site by the decoy renders the transcription factor incapable of subsequently binding to the promoter regions of target genes. Decoys can be used as therapeutic agents, either to inhibit the expression of genes that are activated by a transcription factor, or to up-regulate genes that are suppressed by the binding of a transcription factor. Examples of the utilization of decoy oligonucleotides can be found in Mann et al., J. Clin. Invest., 2000, 106: 1071-1075, which is expressly incorporated by reference herein, in its entirety. Thus, in some embodiments, the anti-miR-130/301 agent is a decoy oligonucleotide.

[0042] In some embodiments, the TS1 PLXNA4 inhibitory agent comprises a sequence substantially complimentary to at least 15 (e.g., 15, 16, 17, 18, 19, 20, 21, 22, 23, 24, 25, 26, 27, 28, 29, or 30) contiguous nucleotides of SEQ ID NO: 1. In some embodiments, the TS1 PLXNA4 inhibitory agent comprises a sequence substantially identical to at least 15 (e.g., 15, 16, 17, 18, 19, 20, 21, 22, 23, 24, 25, 26, 27, 28, 29, or 30) contiguous nucleotides of SEQ ID NO: 1

[0043] In some embodiments, the TS1 PLXNA4 inhibitory agent comprises a nucleotide sequence substantially complementary to: (i) GGTCCTCGCCTCC (SEQ ID NO: 2); (ii) GGTCCTAGCCTCC (SEQ ID NO: 3); (iii) GTTTGCCGTGTCG (SEQ ID NO: 4); (iv) GTTTGCTGTGTCG (SEQ ID NO: 5); (v) TCCCAAACTCCTG (SEQ ID NO: 6); (vi) TCCCAACCTCCTG (SEQ ID NO: 7); or (vii) any combinations of (i)-(vi).

[0044] In some embodiments, the TS1 PLXNA4 inhibitory agent comprises the nucleotide sequence selected from: (i) GGTCCTCGCCTCC (SEQ ID NO: 2); (ii) GGTCCTAGCCTCC (SEQ ID NO: 3); (iii) GTTTGCCGTGTCG (SEQ ID NO: 4); (iv) GTTTGCTGTGTCG (SEQ ID NO: 5); (v) TCCCAAACTCCTG (SEQ ID NO: 6); (vi) TCCCAACCTCCTG (SEQ ID NO: 7); or (vii) any combinations of (i)-(vi).

[0045] In some embodiments, the TS1 PLXNA4 inhibitory agent is an antibody or fragment thereof. The terms “antibody” and “antibodies” include polyclonal antibodies, monoclonal antibodies, humanized or chimeric antibodies, single chain Fv antibody fragments, Fab fragments, and F(ab)₂ fragments. Without limitations, the antibody can be a recombinant antibody, humanized antibody, chimeric antibody, modified antibody, monoclonal antibody, polyclonal antibody, miniantibody, dimeric miniantibody, minibody, diabody or tribody or antigen-binding variants, analogues or modified versions thereof. Antibodies having specific binding affinity for PLXNA4 can be produced through standard methods. Alternatively, antibodies may be commercially available, for example, from R&D Systems, Inc., Minneapolis, Minn.

[0046] As used herein, the terms “antibody” and “antibodies” refer to intact antibody, or a binding fragment thereof that competes with the intact antibody for specific binding and includes chimeric, humanized, fully human, and bispecific antibodies. In some embodiments, binding fragments are produced by recombinant DNA techniques. In additional embodiments, binding fragments are produced by enzymatic or chemical cleavage of intact antibodies. Binding fragments include, but are not limited to, Fab, Fab′, F(ab′)₂, Fv, and single-chain antibodies. Unless it is specifically noted, as used herein a “fragment thereof” in reference to an antibody refers to an immunospecific fragment, i.e., an antigen-specific or binding fragment.

[0047] Monoclonal antibodies, which are homogeneous populations of antibodies to a particular epitope contained within an antigen, can be prepared using standard hybridoma technology. In particular, monoclonal antibodies can be obtained by any technique that provides for the production of antibody molecules by continuous cell lines in culture such as described by Kohler, G. et al., Nature, 1975, 256:495, the human B-cell hybridoma technique (Kosbor et al., Immunology Today, 1983, 4:72; Cole et al., Proc. Natl. Acad. Sci. USA, 1983, 80:2026), and the EBV-hybridoma technique (Cole et al., Monoclonal Antibodies and Cancer Therapy, Alan R. Liss, Inc., 1983, pp. 77-96). Such antibodies can be of any immunoglobulin class including IgG, IgM, IgE, IgA, IgD, and any subclass thereof. The hybridoma producing the monoclonal antibodies of the invention can be cultivated in vitro or in vivo.

[0048] Polyclonal antibodies are heterogeneous populations of antibody molecules that are specific for a particular antigen, which are contained in the sera of the immunized animals. Polyclonal antibodies are produced using well-known methods. A chimeric antibody is a molecule in which different portions are derived from different animal species, such as those having a variable region derived from a murine monoclonal antibody and a human immunoglobulin constant region. Chimeric antibodies can be produced through standard techniques. Antibody fragments that have specific binding affinity for a component of the complex can be generated by known techniques. For example, such fragments include, but are not limited to, F(ab′)₂ fragments that can be produced by pepsin digestion of the antibody molecule, and Fab fragments that can be generated by reducing the disulfide bridges of F(ab′)₂ fragments. Alternatively, Fab expression libraries can be constructed. See, for example, Huse et al., 1989, Science, 246: 1275. Single chain Fv antibody fragments are formed by linking the heavy and light chain fragments of the Fv region via an amino acid bridge (e.g., 15 to 18 amino acids), resulting in a single chain polypeptide. Single chain Fv antibody fragments can be produced through standard techniques. See, for example, U.S. Pat. No. 4,946,778.

[0049] In some embodiments, the antibody or antigen-binding fragment thereof is murine. In some embodiments, the antibody or antigen-binding fragment thereof is from mice. In some embodiments, the antibody or antigen-binding fragment thereof is from rat. In other embodiments, the antibody or antigen binding fragment thereof is human. In some embodiments the antibody or antigen-binding fragment thereof is recombinant, engineered, humanized and/or chimeric.

[0050] As used herein, the terms “treatment” and “treating,” with respect to treatment of AD, means preventing the progression for the disease, or altering the course of the disorder (for example, but not limited to, slowing the progression of the disorder), or reversing a symptom of the disorder or reducing one or more symptoms and/or one or more biochemical markers in a subject, preventing one or more symptoms from worsening or progressing, promoting recovery or improving prognosis. For example, in the case of AD treatment, therapeutic treatment refers to reducing the cognitive deterioration in a subject and/or inhibiting or reducing the level of Aβ in the brain of a subject that is already inflicted with AD. Measurable lessening includes any statistically significant decline in a measurable marker or symptom, such as measuring Aβ in the brain by PET scan, or assessing the cognitive improvement with neuropsychological tests such as verbal and perception after treatment.

[0051] The term “therapeutically effective amount” refers to an amount effective, at dosages and for periods of time necessary, to achieve the desired therapeutic result, e.g., a diminishment or prevention of effects associated with various disease states or conditions, such as reduce a symptom of an Alzheimer's disease in the subject. The term “therapeutically effective amount” refers to an amount of, for example, a TS1 PLXNA4 inhibitory agent, as disclosed herein, effective to treat or prevent a disease or disorder in a mammal, preferably a human. In the case of treatment of Alzheimer's, a therapeutically effective amount may alleviate one or more symptoms associated with the disease including increasing long-term memory, for example.

[0052] As used herein, the terms “administering,” and “introducing” are used interchangeably herein and refer to the placement of the agents, such as a TS1 PLXNA4 inhibitory agent, into a subject by a method or route which results in at least partial localization of a TS1 PLXNA4 inhibitory agent at a desired site such that desired effect is produced, such as intracranially to brain or specific areas of brain. Stereotactic means can be used to guide intracranial administration if desired. Routes of administration suitable for the methods of the invention include both local and systemic administration. Generally, local administration results in more of the composition being delivered to a specific location as compared to the entire body of the subject, whereas, systemic administration can result in delivery to essentially the entire body of the subject. However, it is envisioned that chemotropic property of NSCs can guide the cells to a specific location with a tissue injury, e.g., brain, even with systemic administration. The agent can be administered by any appropriate route which results in an effective treatment in the subject, including, but not limited to, oral or parenteral routes, including intravenous, intramuscular, subcutaneous, transdermal, and nasal administration.

[0053] Exemplary modes of administration include, but are not limited to, injection, infusion, instillation, inhalation, or ingestion. “Injection” includes, without limitation, intravenous, intramuscular, intraarterial, intrathecal, intraventricular, intracapsular, intraorbital, intracardiac, intradermal, intraperitoneal, transtracheal, subcutaneous, subcuticular, intraarticular, sub-capsular, subarachnoid, intraspinal, intracerebro spinal, and intrasternal injection and infusion.

[0054] The phrases “parenteral administration” and “administered parenterally” as used herein means modes of administration other than enteral and topical administration, usually by injection, and includes, without limitation, intravenous, intramuscular, intraarterial, intrathecal, intraventricular, intracapsular, intraorbital, intracardiac, intradermal, intraperitoneal, transtracheal, subcutaneous, subcuticular, intraarticular, sub capsular, subarachnoid, intraspinal, intracerebro spinal, and intrasternal injection and infusion. The phrases “systemic administration,” “administered systemically”, “peripheral administration” and “administered peripherally” as used herein mean the administration of a TS1 PLXNA4 inhibitory agent such that it enters the animal's system and, thus, is subject to metabolism and other like processes, for example, subcutaneous administration.

[0055] The phrase “pharmaceutically acceptable” is employed herein to refer to those compounds, materials, compositions, and/or dosage forms which are, within the scope of sound medical judgment, suitable for use in contact with the tissues of human beings and animals without excessive toxicity, irritation, allergic response, or other problem or complication, commensurate with a reasonable benefit/risk ratio.

[0056] As used herein, the term “pharmaceutically acceptable carrier” means a pharmaceutically-acceptable material, composition or vehicle, such as a liquid or solid filler, diluent, excipient, manufacturing aid (e.g., lubricant, talc magnesium, calcium or zinc stearate, or steric acid), or solvent encapsulating material, involved in carrying or transporting the subject compound from one organ, or portion of the body, to another organ, or portion of the body. Each carrier must be “acceptable” in the sense of being compatible with the other ingredients of the formulation and not injurious to the patient. Some examples of materials which can serve as pharmaceutically-acceptable carriers include: (i) sugars, such as lactose, glucose and sucrose; (ii) starches, such as corn starch and potato starch; (iii) cellulose, and its derivatives, such as sodium carboxymethyl cellulose, methylcellulose, ethyl cellulose, microcrystalline cellulose and cellulose acetate; (iv) powdered tragacanth; (v) malt; (vi) gelatin; (vii) lubricating agents, such as magnesium stearate, sodium lauryl sulfate and talc; (viii) excipients, such as cocoa butter and suppository waxes; (ix) oils, such as peanut oil, cottonseed oil, safflower oil, sesame oil, olive oil, corn oil and soybean oil; (x) glycols, such as propylene glycol; (xi) polyols, such as glycerin, sorbitol, mannitol and polyethylene glycol (PEG); (xii) esters, such as ethyl oleate and ethyl laurate; (xiii) agar; (xiv) buffering agents, such as magnesium hydroxide and aluminum hydroxide; (xv) alginic acid; (xvi) pyrogen-free water; (xvii) isotonic saline; (xviii) Ringer's solution; (xix) ethyl alcohol; (xx) pH buffered solutions; (xxi) polyesters, polycarbonates and/or polyanhydrides; (xxii) bulking agents, such as polypeptides and amino acids (xxiii) serum component, such as serum albumin, HDL and LDL; (xxiv) C2-C12 alcohols, such as ethanol; and (xxv) other non-toxic compatible substances employed in pharmaceutical formulations. Wetting agents, coloring agents, release agents, coating agents, sweetening agents, flavoring agents, perfuming agents, preservative and antioxidants can also be present in the formulation. Pharmaceutically acceptable carriers are well known to those of skill in the art.

[0057] In some embodiments, the disclosure also provides assays to identify a subject with an increased risk for developing late onset AD. In one embodiment, the assay comprises or consists essentially of a system for transforming and identifying at least one nucleic acid polymorphism in a SNP locus described herein in a biological sample of a subject, and a system for computing the likelihood of the subject getting late onset AD on the basis of comparison of the identified nuclei acid at the SNP locus against the AD risk associated alleles described herein. If the computing or comparison system, which can be a computer implemented system, indicates that at least one of the allele at the SNP locus is identical to the corresponding AD risk associated allele, the subject from which the sample is collected can be diagnosed with increased susceptibility for late onset AD.

[0058] As used herein, the term “transforming” or “transformation” refers to changing an object or a substance, e.g., biological sample, nucleic acid or protein, into another substance. The transformation can be physical, biological or chemical. Exemplary physical transformation includes, but not limited to, pre-treatment of a biological sample, e.g., from whole blood to blood serum by differential centrifugation. A biological/chemical transformation can involve at least one enzyme and/or a chemical reagent in a reaction. For example, a DNA sample can be digested into fragments by one or more restriction enzyme, or an exogenous molecule can be attached to a fragmented DNA sample with a ligase. In some embodiments, a DNA sample can undergo enzymatic replication, e.g., by polymerase chain reaction (PCR).

[0059] In one aspect, provided herein is an assay. The assay comprising subjecting a test sample from a subject, e.g., a human subject, to at least one genotyping assay that determines the genotypes of at least one (e.g., one, tow, three, four, five, six, seven, eight, nine, ten or more) loci selected from SNP rs277470, rs277472, rs277473, rs277474, rs277476, rs277477, rs277478, rs277479, rs277480, rs277481, rs277483, rs277484, rs10234979, rs9641933, rs10225863, rs7799929, rs9656410, rs11764790, rs4731860, rs11763817, rs13231950, rs11773243, rs17166338, rs11773724, rs17818325, rs10236235, rs965800, rs10244929, rs4481530, rs1593222, rs1424590, rs1364505, rs6959579, rs11761937, and any combinations thereof; and determining the genotype of said at least one at least one (e.g., one, tow, three, four, five, six, seven, eight, nine, ten or more) loci.

[0060] In some embodiments, the loci are selected from: (i) SNP1, wherein SNP1 is identified by rs277472 on SEQ ID NO: 1, wherein SEQ ID NO. 1 is a portion of genomic nucleic acid sequence of plexin A4 (PLXNA4); (ii) SNP2, wherein SNP2 is position 132,006,366 of SEQ ID NO: 1 identified by rs10236235, wherein SEQ ID NO. 1 is a portion of genomic nucleic acid sequence of PLXNA4; and (iii) SNP3, wherein SNP3 identified by rs11761937 on SEQ ID NO: 1, wherein the SEQ ID NO. 1 is a portion of genomic nucleic acid sequence of PLXNA4.

[0061] In some embodiments, the loci are further selected from: (i) SNP4, wherein SNP4 is identified by rs1593222 on SEQ ID NO: 1, wherein the SEQ ID NO. 1 is a portion of genomic nucleic acid sequence of PLXNA4; (ii) SNP5, wherein SNP4 is identified by rs6959579 on SEQ ID NO: 1, wherein the SEQ ID NO. 1 is a portion of genomic nucleic acid sequence of PLXNA4; and (iii) SNP6, wherein SNP4 is identified by rs17166339 on SEQ ID NO: 1, wherein the SEQ ID NO. 1 is a portion of genomic nucleic acid sequence of PLXNA4.

[0062] In some embodiments, the assay further comprises selecting a treatment regimen that comprises a therapeutically effective amount of a TS1 PLXNA4 inhibitory agent when at least one (e.g., one, two, three or more) of the following combinations of SNPs is determined to be present: (i) SNP1 genotype A/A or A/C (or T/T or T/G in the complement) of SEQ ID NO: 1, wherein SNP1 is identified by rs277472 on SEQ ID NO: 1, wherein SEQ ID NO. 1 is a portion of genomic nucleic acid sequence of plexin A4 (PLXNA4); (ii) SNP2 genotype T/T or T/C (or A/A or A/C in the complement) of SEQ ID NO: 1, wherein SNP2 is position 132,006,366 of SEQ ID NO: 1 identified by rs10236235, wherein SEQ ID NO. 1 is a portion of genomic nucleic acid sequence of PLXNA4; and (iii) SNP3 genotype C/C or C/A (or G/G or G/T in the complement) of SEQ ID NO: 1, wherein SNP3 identified by rs11761937 on SEQ ID NO: 1, wherein the SEQ ID NO. 1 is a portion of genomic nucleic acid sequence of PLXNA4.

[0063] In another aspect, the disclosure provides a method for treating a subject, e.g. a human subject having or at risk for Alzheimer's disease. The method comprising administering a therapeutically effective amount of a TS1 PLXNA4 inhibitory agent to the subject which is determined to carry at least one (e.g., one, two, three or more) SNPs selected from: (i) SNP1 genotype A/A or A/C (or T/T or T/G in the complement) of SEQ ID NO: 1, wherein SNP1 is identified by rs277472 on SEQ ID NO: 1, wherein SEQ ID NO. 1 is a portion of genomic nucleic acid sequence of plexin A4 (PLXNA4); (ii) SNP2 genotype T/T or T/C (or A/A or A/C in the complement) of SEQ ID NO: 1, wherein SNP2 is position 132,006,366 of SEQ ID NO: 1 identified by rs10236235, wherein SEQ ID NO. 1 is a portion of genomic nucleic acid sequence of PLXNA4; and (iii) SNP3 genotype C/C or C/A (or G/G or G/T in the complement) of SEQ ID NO: 1, wherein SNP3 identified by rs11761937 on SEQ ID NO: 1, wherein the SEQ ID NO. 1 is a portion of genomic nucleic acid sequence of PLXNA4.

[0064] In yet another aspect, the disclosure provides a method for selecting a subject having or at risk for AD, wherein the subject is susceptible to treatment with a TS1 PLXNA4 inhibitory agent. The method comprising: (a) contacting a biological sample with at least one (e.g., one, two, three, four or more) oligonucleotide capable of interrogating whether or not the biological sample comprises one or more of the single nucleotide polymorphisms (SNPs) selected from: (i) SNP1 genotype A/A or A/C (or T/T or T/G in the complement) of SEQ ID NO: 1, wherein SNP1 is identified by rs277472 on SEQ ID NO: 1, wherein SEQ ID NO. 1 is a portion of genomic nucleic acid sequence of plexin A4 (PLXNA4); (ii) SNP2 genotype T/T or T/C (or A/A or A/C in the complement) of SEQ ID NO: 1, wherein SNP2 is position 132,006,366 of SEQ ID NO: 1 identified by rs10236235, wherein SEQ ID NO. 1 is a portion of genomic nucleic acid sequence of PLXNA4; and (iii) SNP3 genotype C/C or C/A (or G/G or G/T in the complement) of SEQ ID NO: 1, wherein SNP3 identified by rs11761937 on SEQ ID NO: 1, wherein the SEQ ID NO. 1 is a portion of genomic nucleic acid sequence of PLXNA4; and (b) identifying Alzheimer's disease in the subject as susceptible for treatment with a TS1 PLXNA4 inhibitory agent when at least one (e.g., one, two, or three) of the SNPs of (i)-(iii) is detected in the biological sample, and identifying Alzheimer's disease in the subject as poorly or non-responsive to treatment with the TS1 PLXNA4 inhibitory agent when none of the SNPs of (i)-(iii) is detected in the biological sample.

[0065] In one aspect, the disclosure provide an assay comprising: (a) contacting a biological sample obtained from a subject with a detectable antibody specific for PLXNA4 or detectable nucleic acid complementary to at least part of PLXNA4, e.g., SNP rs277472, SNP rs10236235, and/or SNP rs11761937locus; (b) washing the sample to remove unbound antibody or unbound nucleic acid; (c) measuring the intensity of the signal from the bound, detectable antibody or bound detectable nucleic acid; (d) comparing the measured intensity of the signal with a reference value and if the measured intensity is normal and/or increased relative to the reference value; the subject is identified as having or at risk for AD.

[0066] Another aspect of the present invention relates to a system for obtaining data from at least one test sample obtained from at least one subject, the system comprising: (a) a determination module configured to receive said at least one test sample and perform at least one analysis on said at least one test sample to determine the presence or absence of at least one of the following conditions: (i) the level of expression or amount of PLXNA4 (e.g., PLXNA4 isoform TS1 or TS3) is higher than a pre-determined level; (ii) at least one copy of a single nucleotide polymorphism (SNP) selected from: (1) SNP1 genotype A/A or A/C (or T/T or T/G in the complement) of SEQ ID NO: 1, wherein SNP1 is identified by rs277472 on SEQ ID NO: 1, wherein SEQ ID NO. 1 is a portion of genomic nucleic acid sequence of plexin A4 (PLXNA4); (2) SNP2 genotype T/T or T/C (or A/A or A/C in the complement) of SEQ ID NO: 1, wherein SNP2 is position 132,006,366 of SEQ ID NO: 1 identified by rs10236235, wherein SEQ ID NO. 1 is a portion of genomic nucleic acid sequence of PLXNA4; (3) SNP3 genotype C/C or C/A (or G/G or G/T in the complement) of SEQ ID NO: 1, wherein SNP3 identified by rs11761937 on SEQ ID NO: 1, wherein the SEQ ID NO. 1 is a portion of genomic nucleic acid sequence of PLXNA4; and (4) any combinations thereof; (b) a storage device configured to store data output from said determination module; and (c) a display module for displaying a content based in part on the data output from said determination module, wherein the content comprises a signal indicative of the presence of at least one of these conditions determined by the determination module, or a signal indicative of the absence of at least one of these conditions determined by the determination module.

[0067] In some embodiments, the content displayed from the display module of the system as disclosed herein can further comprise a signal indicative of the subject being recommended to receive a particular treatment regimen, for example, if the subject has one or more of the above conditions, a signal is produced to recommend the subject be administered an AD therapy, for example, but not limited to, a TS1 PLXNA4 inhibitory agent.

[0068] In some embodiments, the subject is recommended for AD therapy, e.g., a treatment with a composition comprising a TS1 PLXNA4 inhibitory agent, where the content from the display module produces a signal indicative of at least one of: (a) increased expression level or amount of TS1 or TS3 PLXNA4 isoform; and (b) presence of at least one AD risk associated SNP as disclosed herein.

[0069] In some embodiments, a subject is not recommended for AD therapy, e.g., a treatment with a composition comprising a TS1 PLXNA4 inhibitory agent, where the content from the display module produces a signal indicative of at least one of: (a) lower or reduced expression level or amount of TS1 or TS3 PLXNA4 isoform; and (b) absence of at least one AD risk associated SNP as disclosed herein.

[0070] In another aspect, the disclosure provides a method of determining if a subject is responsive to a TS1 PLXNA4 inhibitory agent. The method comprising assaying a blood sample for the presence of at least one (e.g., one, two, or three) of: (i) SNP1 genotype A/A or A/C (or T/T or T/G in the complement) of SEQ ID NO: 1, wherein SNP1 is identified by rs277472 on SEQ ID NO: 1, wherein SEQ ID NO. 1 is a portion of genomic nucleic acid sequence of plexin A4 (PLXNA4); (ii) SNP2 genotype T/T or T/C (or A/A or A/C in the complement) of SEQ ID NO: 1, wherein SNP2 is position 132,006,366 of SEQ ID NO: 1 identified by rs10236235, wherein SEQ ID NO. 1 is a portion of genomic nucleic acid sequence of PLXNA4; and (iii) SNP3 genotype C/C or C/A (or G/G or G/T in the complement) of SEQ ID NO: 1, wherein SNP3 identified by rs11761937 on SEQ ID NO: 1, wherein the SEQ ID NO. 1 is a portion of genomic nucleic acid sequence of PLXNA4.

### SNPs, Polymorphisms and Alleles

[0071] The genomes of all organisms undergo spontaneous mutation in the course of their continuing evolution, generating variant forms of progenitor genetic sequences (Gusella, Ann. Rev. Biochem. 55, 831-854 (1986)). The coexistence of multiple forms of a genetic sequence gives rise to genetic polymorphisms, including SNPs.

[0072] Approximately 90% of all polymorphisms in the human genome are SNPs. SNPs are single base positions in DNA at which different alleles, or alternative nucleotides, exist in a population. The SNP position (interchangeably referred to herein as SNP, SNP site, SNP allele or SNP locus) is usually preceded by and followed by highly conserved sequences of the allele (e.g., sequences that vary in less than 1/100 or 1/1000 members of the populations). An individual can be homozygous or heterozygous for an allele at each SNP position. A SNP can, in some instances, be referred to as a “cSNP” to denote that the nucleotide sequence containing the SNP is an amino acid coding sequence.

[0073] A SNP can arise from a substitution of one nucleotide for another at the polymorphic site. Substitutions can be transitions or transversions. A transition is the replacement of one purine nucleotide by another purine nucleotide, or one pyrimidine by another pyrimidine. A transversion is the replacement of a purine by a pyrimidine, or vice versa. A SNP can also be a single base insertion or deletion variant referred to as an “in/del” (Weber et al., “Human diallelic insertion/deletion polymorphisms”, Am J Hum Genet October 2002; 71(4):854-62).

[0074] A synonymous codon change, or silent mutation/SNP (the terms “SNP” and “mutation” are used herein interchangeably), is one that does not result in a change of amino acid due to the degeneracy of the genetic code. A substitution that changes a codon coding for one amino acid to a codon coding for a different amino acid (i.e., a non-synonymous codon change) is referred to as a missense mutation. A nonsense mutation results in a type of non-synonymous codon change in which a stop codon is formed, thereby leading to premature termination of a polypeptide chain and a truncated protein. A read-through mutation is another type of non-synonymous codon change that causes the destruction of a stop codon, thereby resulting in an extended polypeptide product. While SNPs can be bi-, tri-, or tetra-allelic, the vast majority of the SNPs are bi-allelic, and are thus often referred to as “bi-allelic markers”, or “di-allelic markers”.

[0075] A major database of human SNPs is maintained at NCBI as dbSNP, and it contains data for unique human SNPs consisting of 1.1×10⁸ submitted SNP (identified by an “ss” number) and 2.4×10⁷ reference SNP (identified by an “rs” number), as of Build History 131: human_9606 based on GRCh37 available from the NCBI website. The rs numbers are unique, do not change and allow analysis of the particularly identified SNP in any genetic sample. Throughout the specification, the SNPs described herein are identified by an “rs” number. One of skill in the art will be able to determine the position of a specific SNP within a respective chromosome.

[0076] The most common type of SNP in humans has alleles A and G. Since DNA is a double helix, the opposite strand has alleles T and C. So an A/G SNP can also be described as a T/C SNP, depending upon orientation. The distribution of the types of SNPs in humans was estimated as follows: 63% A/G (and T/C), 17% A/C (and T/G), 8% CG, 4% AT, and 8% insertion/deletions (Miller, R. D., P. Taillon-Miller, and P. Y. Kwok. 2001. Regions of Low Single-Nucleotide Polymorphism Incidence in Human and Orangutan Xq: Deserts and Recent Coalescences. Genomics 71: 78-88).

[0077] While a SNP could conceivably have three or four alleles, nearly all SNPs have only two alleles. Analysis of the SNPs identified in this study all rely on the two alleles that are listed in connection with each SNP. For example, one of the AD risk associated SNP described herein, rs277472 is indicated to have two alleles, A or C. The presence of an allele A at the rs277472 locus indicates an increased risk for AD.

[0078] An association study of a SNP and a specific disorder involves determining the presence or frequency of the SNP allele in biological samples from subjects with the disorder of interest, such as Alzheimer's disease, and comparing the information to that of controls (i.e., individuals who do not have the disorder; controls can be also referred to as “healthy” or “normal” individuals) who are preferably of similar age and race. The appropriate selection of patients and controls is important to the success of SNP association studies. Therefore, a pool of individuals with well-characterized phenotypes is desirable. Association studies can be conducted within the general population and are not limited to studies performed on related individuals in affected families (linkage studies).

[0079] A SNP can be screened in any biological sample obtained from an individual or a subject diagnosed with or at risk of a disease or disorder, e.g., Alzheimer's disease. If an allele herein discovered as an AD risk allele is identified, the subject can be identified as at greater risk of developing AD than a subject who is not carrying that alleles.

[0080] Particular SNP alleles, sometimes referred to as polymorphisms or polymorphic alleles, of the present invention can be associated with an increased risk of developing AD. In some embodiments the AD is late-onset form. Mutations or alleles identifying a subject with an increased risk of developing a disorder, for example, late onset AD, are also referred to as “susceptibility” alleles, or mutations.

[0081] Those skilled in the art will readily recognize that nucleic acid molecules can be double-stranded molecules and that reference to a particular site on one strand refers, as well, to the corresponding site on a complementary strand. In defining a SNP position, SNP allele, or nucleotide sequence, reference to an adenine, a thymine (uridine), a cytosine, or a guanine at a particular site on one strand of a nucleic acid molecule also defines the thymine (uridine), adenine, guanine, or cytosine (respectively) at the corresponding site on a complementary strand of the nucleic acid molecule. Thus, reference can be made to either strand in order to refer to a particular SNP position, SNP allele, or nucleotide sequence. Probes and primers can be designed to hybridize to either strand and SNP genotyping methods disclosed herein can generally target either strand. Accordingly, the claims are intended to cover analysis of the opposite strand as well. For the opposite-strand analysis.

[0082] Identification method of SNPs can be of either a positive-type (inclusion of an allele) or a negative-type (exclusion of an allele). Positive-type methods determine the identity of a nucleotide contained in a polymorphic site, whereas negative-type methods determine the identity of a nucleotide not present in a polymorphic site. Thus, a wild-type site can be identified either as wild-type or not mutant. For example, at a biallelic polymorphic site where the wild-type allele contains a cytosine and the mutant allele contains adenine, a site can be positively determined to be either adenine or cytosine or negatively determined to be not adenine (and thus cytosine) or not cytosine (and thus adenine).

[0083] In one aspect, the nucleic acid sequences of the gene's allelic variants, or portions thereof, can be the basis for probes or primers, e.g., in methods for determining the identity of the allelic variant of the polymorphic region. Thus, in one embodiment, nucleic acid probes or primers can be used in the methods of the present invention to determine whether a subject is at risk of developing disease such as Alzheimer's disease. One of skill in the art can readily access the nucleic acid sequences spanning the SNPs described herein through the NCBI dbSNP database with the “rs” number uniquely assigned to each SNPs described herein. Thus, a skilled artisan can readily design and optimize primers or probes based on the flanking sequences of the SNP loci described herein.

[0084] The polymorphisms of PLXNA4 disclosed herein can be detected directly or indirectly using any of a variety of suitable methods including fluorescent polarization, mass spectroscopy, and the like. Suitable methods comprise direct or indirect sequencing methods, restriction site analysis, hybridization methods, nucleic acid amplification methods, gel migration methods, the use of antibodies that are specific for the proteins encoded by the different alleles of the polymorphism, or by other suitable means. Alternatively, many such methods are well known in the art and are described, for example in T. Maniatis et al., Molecular Cloning, a Laboratory Manual, 2nd Edition, Cold Spring Harbor Press, Cold Spring Harbor, N.Y. (1989), J. W. Zyskind et al., Recombinant DNA Laboratory Manual, Academic Press, Inc., New York (1988), and in R. Elles, Molecular Diagnosis of Genetic Diseases, Humana Press, Totowa, N.J. (1996), and Mamotte et al, 2006, Clin Biochem Rev, 27; 63-75) each herein incorporated by reference.

[0085] Methods to measure gene expression products associated with AD risk associated SNPs described herein are well known to a skilled artisan. Such methods to measure gene expression products, e.g., protein level, include ELISA (enzyme linked immunosorbant assay), western blot, immunoprecipitation, immunofluorescence using detection reagents such as an antibody or protein binding agents. Alternatively, a peptide can be detected in a subject by introducing into a subject a labeled anti-peptide antibody and other types of detection agent. For example, the antibody can be labeled with a radioactive marker whose presence and location in the subject is detected by standard imaging techniques, particularly useful are methods that detect the allelic variant of a peptide expressed in a subject and methods which detect fragments of a peptide in a sample.

[0086] Without limitations, any approach that detects mutations or polymorphisms in a gene can be used, including but not limited to single-strand conformational polymorphism (SSCP) analysis (Orita et al. (1989) Proc. Natl. Acad. Sci. USA 86:2766-2770), heteroduplex analysis (Prior et al. (1995) Hum. Mutat. 5:263-268), oligonucleotide ligation (Nickerson et al. (1990) Proc. Natl. Acad. Sci. USA 87:8923-8927) and hybridization assays (Conner et al. (1983) Proc. Natl. Acad. Sci. USA 80:278-282). Traditional Taq polymerase PCR-based strategies, such as PCR-RFLP, allele-specific amplification (ASA) (Ruano and Kidd (1989) Nucleic Acids Res. 17:8392), single-molecule dilution (SMD) (Ruano et al. (1990) Proc. Natl. Acad. Sci. USA 87:6296-6300), and coupled amplification and sequencing (CAS) (Ruano and Kidd (1991) Nucleic Acids Res. 19:6877-6882), are easily performed and highly sensitive methods to determine haplotypes of the present invention (Michalatos-Beloin et al. (1996) Nucleic Acids Res. 24:4841-4843; Barnes (1994) Proc. Natl. Acad. Sci. USA 91:5695-5699; Ruano and Kidd (1991) Nucleic Acids Res. 19:6877-6882).

[0087] In some embodiments, the gene expression products as described herein can be determined by determining the level of messenger RNA (mRNA) expression of genes associated with SNPs described herein (e.g., PLXNA 4). Such molecules can be isolated, derived, or amplified from a biological sample, such as body fluids. Detection of mRNA expression is known by persons skilled in the art, and comprise, for example but not limited to, PCR procedures, RT-PCR, Northern blot analysis, differential gene expression, RNA protection assay, microarray analysis, hybridization methods etc.

[0088] Nucleic acid or ribonucleic acid (RNA) molecules can be isolated from a particular biological sample using any of a number of procedures, which are well-known in the art, the particular isolation procedure chosen being appropriate for the particular biological sample. For example, freeze-thaw and alkaline lysis procedures can be useful for obtaining nucleic acid molecules from solid materials; heat and alkaline lysis procedures can be useful for obtaining nucleic acid molecules from urine; and proteinase K extraction can be used to obtain nucleic acid from blood (Roiff, A et al. PCR: Clinical Diagnostics and Research, Springer (1994)).

[0089] In general, the PCR procedure describes a method of gene amplification which is comprised of (i) sequence-specific hybridization of primers to specific genes within a nucleic acid sample or library, (ii) subsequent amplification involving multiple rounds of annealing, elongation, and denaturation using a DNA polymerase, and (iii) screening the PCR products for a band of the correct size. The primers used are oligonucleotides of sufficient length and appropriate sequence to provide initiation of polymerization, i.e. each primer is specifically designed to be complementary to each strand of the genomic locus to be amplified.

[0090] In an alternative embodiment, mRNA level of gene expression products described herein can be determined by reverse-transcription (RT) PCR and by quantitative RT-PCR (QRT-PCR) or real-time PCR methods. Methods of RT-PCR and QRT-PCR are well known in the art.

[0091] In some embodiments, an allelic discrimination method can be used for identifying the genotype of SNPs described herein. In some embodiments, the allelic discrimination method involves use of a first oligonucleotide probe which anneals with a target portion of the individual's genome. Because the nucleotide residue at this position differs, the first probe is completely complementary to only one of the two alleles. Alternatively, a second oligonucleotide probe can also be used which is completely complementary to the target portion of the other of the two alleles. The allelic discrimination method also involves use of at least one, and preferably a pair of amplification primers for amplifying a reference region, for example, at least a portion of the flanking region including the SNP locus of interest.

[0092] The probe in some embodiments is a DNA oligonucleotide having a length in the range from about 20 to about 40 nucleotide residues, preferably from about 20 to about 30 nucleotide residues, and more preferably having a length of about 25 nucleotide residues. In one embodiment, the probe is rendered incapable of extension by a PCR-catalyzing enzyme such as Taq polymerase, for example by having a fluorescent probe attached at one or both ends thereof. Although non-labeled oligonucleotide probes can be used in the kits and methods of the invention, the probes are preferably detectably labeled. Exemplary labels include radionuclides, light-absorbing chemical moieties (e.g. dyes), fluorescent moieties, and the like. Preferably, the label is a fluorescent moiety, such as 6-carboxyfluorescein (FAM), 6-carboxy-4,7,2′,7′-tetrachlorofluoroscein (TET), rhodamine, JOE (2,7-dimethoxy-4,5-dichloro-6-carboxyfluorescein), HEX (hexachloro-6-carboxyfluorescein), or VIC.

[0093] In some embodiments, the probe can comprise both a fluorescent label and a fluorescence-quenching moiety such as 6-carboxy-N,N,N′,N′-tetramethylrhodamine (TAMRA), or 4-(4′-dimethlyaminophenylazo)benzoic acid (DABCYL). When the fluorescent label and the fluorescence-quenching moiety are attached to the same oligonucleotide and separated by no more than about 40 nucleotide residues, and preferably by no more than about 30 nucleotide residues, the fluorescent intensity of the fluorescent label is diminished. When one or both of the fluorescent label and the fluorescence-quenching moiety are separated from the oligonucleotide, the intensity of the fluorescent label is no longer diminished. In some embodiments, the probe of the present invention has a fluorescent label attached at or near (i.e. within about 10 nucleotide residues of) one end of the probe and a fluorescence-quenching moiety attached at or near the other end. Degradation of the probe by a PCR-catalyzing enzyme releases at least one of the fluorescent label and the fluorescence-quenching moiety from the probe, thereby discontinuing fluorescence quenching and increasing the detectable intensity of the fluorescent labels. Thus, cleavage of the probe (which, as discussed above, is correlated with complete complementarity of the probe with the target portion) can be detected as an increase in fluorescence of the assay mixture.

[0094] If different detectable labels are used, more than one labeled probe can be used, and therefore polymorphisms can be performed in multiplex. For example, the assay mixture can contain a first probe which is completely complementary to the target portion of a first AD associated SNP and to which a first label is attached, and a second probe which is completely complementary to the target portion of a second AD risk associated SNP. When two probes are used, the probes are detectably different from each other, having, for example, detectably different size, absorbance, excitation, or emission spectra, radiative emission properties, or the like. For example, a first probe can be completely complementary to the target portion of the polymorphism and have FAM and TAMRA attached at or near opposite ends thereof. The first probe can be used in the method of the present invention together with a second probe which is completely complementary to the target portion of another AD risk associated and has TET and TAMRA attached at or near opposite ends thereof. Fluorescent enhancement of FAM (i.e. effected by cessation of fluorescence quenching upon degradation of the first probe by Taq polymerase) can be detected at one wavelength (e.g. 518 nanometers), and fluorescent enhancement of TET (i.e. effected by cessation of fluorescence quenching upon degradation of the second probe by Taq polymerase) can be detected at a different wavelength (e.g. 582 nanometers). Using multiplexing methods, more than one SNP described herein can be detected, providing a better diagnosis and more reliable prediction of AD susceptibility in a subject.

[0095] In some embodiments, the probe comprises a nucleotide sequence substantially complementary to: (i) GGTCCTCGCCTCC (SEQ ID NO: 2); (ii) GGTCCTAGCCTCC (SEQ ID NO: 3); (iii) GTTTGCCGTGTCG (SEQ ID NO: 4); (iv) GTTTGCTGTGTCG (SEQ ID NO: 5); (v) TCCCAAACTCCTG (SEQ ID NO: 6); (vi) TCCCAACCTCCTG (SEQ ID NO: 7); or (vii) any combinations of (i)-(vi).

[0096] In some embodiments, the probe comprises the nucleotide sequence selected from: (i) GGTCCTCGCCTCC (SEQ ID NO: 2); (ii) GGTCCTAGCCTCC (SEQ ID NO: 3); (iii) GTTTGCCGTGTCG (SEQ ID NO: 4); (iv) GTTTGCTGTGTCG (SEQ ID NO: 5); (v) TCCCAAACTCCTG (SEQ ID NO: 6); (vi) TCCCAACCTCCTG (SEQ ID NO: 7); or (vii) any combinations of (i)-(vi).

[0097] Another allelic discrimination method suitable for use in detection of SNPs employs “molecular beacons”. Detailed description of this methodology can be found in Kostrikis et al., Science 1998, 279:1228-1229, content of which is incorporated herein by reference in its entirety.

[0098] In some embodiments, the molecular beacon probe comprises a nucleotide sequence substantially complementary to: (i) GGTCCTCGCCTCC (SEQ ID NO: 2); (ii) GGTCCTAGCCTCC (SEQ ID NO: 3); (iii) GTTTGCCGTGTCG (SEQ ID NO: 4); (iv) GTTTGCTGTGTCG (SEQ ID NO: 5); (v) TCCCAAACTCCTG (SEQ ID NO: 6); (vi) TCCCAACCTCCTG (SEQ ID NO: 7); or (vii) any combinations of (i)-(vi).

[0099] In some embodiments, the molecular beacon probe comprises the nucleotide sequence selected from: (i) GGTCCTCGCCTCC (SEQ ID NO: 2); (ii) GGTCCTAGCCTCC (SEQ ID NO: 3); (iii) GTTTGCCGTGTCG (SEQ ID NO: 4); (iv) GTTTGCTGTGTCG (SEQ ID NO: 5); (v) TCCCAAACTCCTG (SEQ ID NO: 6); (vi) TCCCAACCTCCTG (SEQ ID NO: 7); or (vii) any combinations of (i)-(vi).

[0100] The use of microarrays comprising a multiplicity of sequences is becoming increasingly common in the art. Accordingly, a microarray having at least one oligonucleotide probe, as described above, appended thereon, can be used for SNP genotyping.

[0101] In some embodiments, restriction enzymes can be utilized to identify variances or a polymorphic site using “restriction fragment length polymorphism” (RFLP) analysis (Lentes et al., Nucleic Acids Res. 16:2359 (1988); and C. K. McQuitty et al., Hum. Genet. 93:225 (1994)). In RFLP, at least one target polynucleotide is digested with at least one restriction enzyme and the resulting restriction fragments are separated based on mobility in a gel. Typically, smaller fragments migrate faster than larger fragments. Consequently, a target polynucleotide that contains a particular restriction enzyme recognition site will be digested into two or more smaller fragments, which will migrate faster than a larger fragment lacking the restriction enzyme site. Knowledge of the nucleotide sequence of the target polynucleotide, the nature of the polymorphic site, and knowledge of restriction enzyme recognition sequences guide the design of such assays. In another embodiment of the present invention, restriction site analysis of particular nucleotide sequence to identify a nucleotide at a polymorphic site is determined by the presence or absence of a restriction enzyme site. A large number of restriction enzymes are known in the art and, taken together, they are capable of recognizing at least one allele of many polymorphisms. However, such single nucleotide polymorphisms (SNPs) rarely result in changes in a restriction endonuclease site. Thus, SNPs are rarely detectable by restriction fragment length analysis.

[0102] A number of approaches use DNA ligase, an enzyme that can join two adjacent oligonucleotides hybridized to a DNA template. In Oligonucleotide ligaton assay (OLA) the sequence surrounding the mutation site is first amplified and one strand serves as a template for three ligation probes, two of these are ASO (allele-specific oligonucleotides) and a third common probe. Numerous approaches cane be used for the detection of the ligated products, for example the ASOs with differentially labeled with fluorescent of hapten labels and ligated products detected by fluorogenic of colorimetric enzyme-linked immunosorbant assays (Tobe et al, Nucleic Acid Res, 1996; 24; 3728-32). For electrophoresis-based systems, use of a morbidity modifier taqgs or variation in probe length coupled with fluorescence detection enables the multiplex genotyping of several single nucleotide substitutions in a single tube (Baron et al, 1997; Clinical Chem., 43, 1984-6). When used on arrays, ASOs can be spotted at specific locations or addresses on a chip, PCR amplified DNA can then be added and ligation to labeled oligonucleotides at specific addresses on the array measured (Zhong et al, Proc Natl Acad Sci 2003; 100, 11559-64).

[0103] Single base-extension or minisequencing involves annealing an oligonucleotide primer to the single strand of a PCR product and the addition of a single dideoxynucleotide by thermal DNA polymerase. The oligonucleotide is designed to be one base short of the mutation site. The dideoxynucleotide incorporated is complementary to the base at the mutation site. Approaches cans uses different fluorescent tags or haptens for each of the four different dideoxynucleotides (Pastinen et al, Clin Chem 1996, 42, 1391-7). The dideoxynucleotide differ in molecular weight and this is the basis for single-base extension methods utilizing mass-spectrometry, and genotyping based on the mass of the extended oligonucleotide primer, can be used, for example matrix-assisted laser adsorption/ionization time-of flight mass spectrometry or MALDI-TOF (Li et al, Electrophoresis, 1999,20; 1258-65), which is quantitative and can be used to calculate the relative allele abundance making the approach suitable for other applications such as gene dosage studies (for example for estimation of allele frequencies on pooled DNA samples).

[0104] Minisequencing or Microsequencing by MALDI-TOF can be performed by means known by persons skilled in the art. In a variation of the MALDI-TOF technique, some embodiments can use the Sequenom's Mass Array Technology (www.sequenom.com) (Sauser et al, Nucleic Acid Res, 2000, 28; E13 and Sauser et al, Nucleic Acid Res 2000, 28: E100). and also the GOOD Assay (Sauer S et al, Nucleic Acid Res, 2000; 28, E13 and Sauer et al, Nucleic Acid Res, 2000; 28:E100).

[0105] In some embodiments, variations of MALDI-TOF can be performed for analysis of variances in the genes associated with SNPs described herein. For example, MALDI and electrospray ionization (ESI) (Sauer S. Clin Chem Acta, 2006; 363; 93-105) is also useful with the methods of the present invention.

[0106] Allele-specific Amplification is also known as amplification refectory mutation system (ARMS) uses allele specific oligonucleotides (ASO) PCR primers and is an well established and known PCR based method for genotyping (Newton et al, J Med Genet, 1991; 28; 248-51). Typically, one of the two oligonucleotide primers used for the PCR binds to the mutation site, and amplification only takes place if the nucleotide of the mutation is present, with a mismatch being refractory to amplification. The resulting PCR Products can be analyzed by any means known to persons skilled in the art. In a variation of the approach, termed mutagenically separated PCR (MS-PCR) the two ARMS primer of different lengths, one specific for the normal gene and one for the mutation are used, to yield PCR procures of different lengths for the normal and mutant alleles (Rust et al, Nucl Acids Res, 1993; 21; 3623-9). Subsequent gel electrophoresis, for example will show at least one of the two allelic products, with normal, mutant or both (heterozygote) genes. A further variation of this forms the basis of the Masscode System™ (www.bioserve.com) which uses small molecular weight tags covalently attached through a photo-cleavable linker to the ARMS primers, with each ARMS primers labeled with a tag of differing weight (Kokoris et al, 2000, 5; 329-40). A catalogue of numerous tags allows simultaneous amplification/genotyping (multiplexing) of 24 different targets in a single PCR reaction. For any one mutation, genotyping is based on comparison of the relative abundance of the two relevant mass tags by mass spectrometry.

[0107] Normal or mutant alleles can be genotyped by measuring the binding of allele-specific oligonucleotides (ASO) hybridization probes. In such embodiments, two ASO probes, one complementary to the normal allele and the other to the mutant allele are hybridized to PCR-amplified DNA spanning the mutation site. In some embodiments, the amplified products can be immobilized on a solid surface and hybridization to radiolabelled oligonucleotides such as known as a ‘dot-blot’ assay. In alternative embodiments, the binding of the PCR products containing a quantifiable label (eg biotin or fluorescent labels) to a solid phase allele-specific oligonucleotide can be measured. Alternatively, for a reverse hybridixation assay, or “reverse dot-blot” the binding of PCR products containing a quantifiable label (for example but not limited to biotin or fluorescent labels) to a solid phase allele-specific oligonucleotide can be measured. In some embodiments, the use of microarrays comprising hundreds of ASO immobilized onto a solid support surfaces to form an array of ASO can also be used for large scale genotyping of multiple single polymorphisms simultaneously, for example Affymetrix GENECHIP® Mapping 10K Array, which can easily be performed by persons skilled in the art.

[0108] In some embodiments, the ASO comprises a nucleotide sequence substantially complementary to: (i) GGTCCTCGCCTCC (SEQ ID NO: 2); (ii) GGTCCTAGCCTCC (SEQ ID NO: 3); (iii) GTTTGCCGTGTCG (SEQ ID NO: 4); (iv) GTTTGCTGTGTCG (SEQ ID NO: 5); (v) TCCCAAACTCCTG (SEQ ID NO: 6); (vi) TCCCAACCTCCTG (SEQ ID NO: 7); or (vii) any combinations of (i)-(vi).

[0109] In some embodiments, the ASO comprises a nucleotide sequence selected from (i) GGTCCTCGCCTCC (SEQ ID NO: 2); (ii) GGTCCTAGCCTCC (SEQ ID NO: 3); (iii) GTTTGCCGTGTCG (SEQ ID NO: 4); (iv) GTTTGCTGTGTCG (SEQ ID NO: 5); (v) TCCCAAACTCCTG (SEQ ID NO: 6); (vi) TCCCAACCTCCTG (SEQ ID NO: 7); or (vii) any combinations of (i)-(vi).

[0110] Homogenous assays, also called “closed tube” arrays, genomic DNA and all the reagents required for the amplification and genotyping are added simultaneously. Genotyping can be achieved without any post-amplification processing. In some embodiments, one such homogenous assay is the 5′fluorogenic nuclease assay, also known as the TAQMAN® Assay (Livak et al, Genet Anal, 1999; 14:143-9) and in alternative embodiments Melting curve analyses of FRET probes are used. Such methods are carried out using “real-time” theromcyclers, and utilize two dual-labeled ASO hybridization probes complementary to normal and mutant alleles, where the two probes have different reported labels but a common quencher dye. In such embodiments, the changes in fluorescence characteristics of the probes upon binding to PCR products of target genes during amplification enables “real-time” monitoring of PCR amplification and differences in affinity of the fluorogenic probes for the PCR products of normal and mutant genes enables differentiation of genotypes. The approach uses two dual-labeled ASO hybridization probes complementary to the mutant and normal alleles. The two probes have different fluorescent reported dyes but a common quencher dye. When intact, the probes do not fluoresces due to the proximity of the reporter and quencher dyes. During annealing phase of PCR, two probes compete for hybridization to their target sequences, downstream of the primer sites and are subsequently cleaved by 5′ nuclease activity of Thermophilis aquaticus (Taq) polymerase as the primer is extended, resulting in the separation of the reporter dyes from the quencher. Genotyping is determined by measurement of the fluorescent intensity of the two reporter dyes after PCR amplification. Thus, when intact the probes do not fluoresce due to the proximity of the quencher dyes, whereas during the annealing phase of the PCR the probes compete for hybridization of the target sequences and the separation of one of the probes from the quencher which can be detected.

[0111] Melting-curve analysis of FRET hybridization is another approach useful in the method of the invention. Briefly, the reaction includes two oligonucleotide probes which when in close proximity forms a fluorescent complex, where one probe often termed the “mutant sensor” probe is designed to specifically hybridize across the mutation site and the other probe (often referred to as the “anchor probe”) hybridizes to an adjacent site. Fluorescent light is emitted by the “donor” excites the “acceptor” fluorophore creasing a unique fluorogenic complex, which only forms when the probes bind to adjacent sites on the amplified DNA. The “sensor” probe is complementary to either the normal or the mutant allele. Once PCR is complete, heating of the sample through the melting temperatures of the probe yields a fluorescent temperature curve which differs for the mutant and normal allele.

[0112] A variation of the FRET hybridization method is the LCGREEN™ method, which obviates the requirement for fluorescent labeled probes altogether. LCGREEN™ is a sensitive highly fluorogenic double-stranded DNA (dsDNA) binding dye that is used to detect the dissociation of unlabelled probes (Liew et al, Clin Chem, 2004; 50; 1156-64 and Zhou et al, Clin Chem, 2005; 51; 1761-2). The method uses unlabeled allele-specific oligonucleotides probes that are perfectly complementary either to the mutant or normal allele, and the mismatch of the ASO/template double strand DNA complex results in a lower melting temperature and an earlier reduction in fluorescent signal form the dsDNA binding dye with increasing temperature.

[0113] The OLA can also be used for FRET Probes (Chen et al, 1998; 8:549-56), for example, the PCR/ligation mixture can contain PCR primers, DNA polymerase without 5′ nuclease activity, thermal stable DNA ligase and oligonucleotides for the ligation reaction. The ligation of the allele-specific oligonucleotides have a different acceptor fluorophore and the third ligation oligonucleotide, which binds adjacently to the ASO has a donor fluorophore, and the three ligation oligonucleotides are designed to have a lower melting temperature for the PCR primers to prevent their interference in the PCR amplification. Following PCR, the temperature is lowered to allow ligation to proceed, which results in FRET between the donor and acceptor dyes, and alleles can be disconcerted by comparing the fluorescence emission of the two dyes.

[0114] Alternatives to homogenous PCR- and hybridization-based techniques are also encompassed. For example, molecular beacons (Tyagi et al, Nat Biotech, 1998, 16: 49-53) and SCORPION® probes (Thelwell et al, Nucleic Acid Res, 2000; 28; 3752-610).

[0115] The OLA can also be performed by the use of FRET probes (Chen et al, Genome Res, 1998; 8: 549-56). In such an embodiment, the PCR/ligation mix contains PCR primers, a thermostable DNA polymerase without 5′ exonuclease activity (to prevent the cleavage of ligation probes during the ligation phase), a thermostable DNA ligase as well as the oligonucleotides for the ligation reaction. The ligation of the ASO each have a different acceptor flurophore and the third ligation oligonucleotide which binds adjacently to the ASO has a donor flurophore. The three ligation oligonucleotides are designed to have a lower melting temperature than the annealing temperature for the PCR primers to prevent their interference in PCR amplification. Following PCR, the temperature is lowered to allow ligation to proceed. Ligation results in FRET between donor and acceptor dyes, and alleles can be discerned by comparing the fluorescence emission of the two dyes.

[0116] Further, variations of the homogenous PCR- and hybridization based techniques to detect polymorphisms are also encompassed in the present invention. For example, the use of Molecular Beacons (Tyagi et al, Nat Biotech 1998; 16; 49-53) and SCORPION® Probes (Thelwell et al, Nucleic Acid Res 2000; 28; 3752-61). Molecular Beacons are comprised of oligonucleotides that have fluorescent reporter and dyes at their 5′ and 3′ ends, with the central portion of the oligonucleotide hybridizing across the target sequence, but the 5′ and 3′ flanking regions are complementary to each other. When not hybridized to their target sequence, the 5′ and 3′ flanking regions hybridize to form a stem-loop structure, and there is little fluorescence because of the proximity of the reported and the quencher dyes. However, upon hybridization to their target sequence, the dyes are separated and there is a large increase in the fluorescence. Mismatched probe-target hybrids dissociate at substantially lower temperatures than exactly matched complementary hybrids. There are a number of variations of the “molecular Beacon” approach. In some embodiments, such a variation includes use of SCORPION® Probes which are similar but incorporate a PCR primer sequence as part of the probe (Thelwell et al, Nucleic Acid Res 2000; 28; 3752-61). In another variation, ‘duplex’ format gives a better fluorescent signal (Solinas et al, Nucleic Acid Res, 2001, 29; E96).

[0117] In another embodiment, polymorphisms can be detected by genotyping using a homogenous or real-time analysis on whole blood samples, without the need for DNA extraction or real-time PCR. Such a method is compatible with FRET and TAQMAN® (Castley et al, Clin Chem, 2005; 51; 2025-30) enabling extremely rapid screening for the particular polymorphism of interest.

[0118] In Fluorescent Polarization (FP), the degree to which the emitted light remains polarized in a particular plane is proportional to the speed at which the molecules rotate and tumble in solution. Under constant pressure, temperature and viscosity, FP is directly related to the molecular weight of a fluorescent species. Therefore, when a small fluorescent molecule is incorporated into a larger molecule, there is an increase in FP. FP can be used in for genotyping of polymorphisms of interest (Chen et al, Genome Res, 1999; 9: 492-8 and Latif et al, Genome Res, 2001; 11; 436-40). FP can be utilized in 5′ nuclease assay (as described above), where the oligonucleotide probe is digested to a lower molecule weight species, for example is amenable to analysis by FP, but with the added benefit of not requiring a quencher. For example, Perlkin-Elmers AcycloPrime™-FP SNP Detection Kit can be used as a FP minisequencing method. Following PCR amplification, unicoportated primers and nucleotides are degraded enzymatically, the enzymes heat inactivated and a miniseqencing reaction using DNA polymerase and fluorescent-labelled dideoxynucleotides performed. FP is then measured, typically in a 96- to 386-well plate format on a FP-plate reader.

[0119] In some embodiments, the primer extension reaction and analysis is performed using PYROSEQUENCING™ (Uppsala, Sweden) which essentially is sequencing by synthesis. A sequencing primer, designed directly next to the nucleic acid differing between the disease-causing mutation and the normal allele or the different SNP alleles is first hybridized to a single stranded, PCR amplified DNA template from the individual, and incubated with the enzymes, DNA polymerase, ATP sulfurylase, luciferase and apyrase, and the substrates, adenosine 5′ phosphosulfate (APS) and luciferin. One of four deoxynucleotide triphosphates (dNTP), for example, corresponding to the nucleotide present in the mutation or polymorphism, is then added to the reaction. DNA polymerase catalyzes the incorporation of the dNTP into the standard DNA strand. Each incorporation event is accompanied by release of pyrophosphate (PPi) in a quantity equimolar to the amount of incorporated nucleotide. Consequently, ATP sulfurylase converts PPi to ATP in the presence of adenosine 5′ phosphosulfate. This ATP drives the luciferase-mediated conversion of luciferin to oxyluciferin that generates visible light in amounts that are proportional to the amount of ATP. The light produced in the luciferase-catalyzed reaction is detected by a charge coupled device (CCD) camera and seen as a peak in a PYROGRAM™. Each light signal is proportional to the number of nucleotides incorporated and allows a clear determination of the presence or absence of, for example, the mutation or polymorphism. Thereafter, apyrase, a nucleotide degrading enzyme, continuously degrades unincorporated dNTPs and excess ATP. When degradation is complete, another dNTP is added which corresponds to the dNTP present in for example the selected SNP. Addition of dNTPs is performed one at a time. Deoxyadenosine alfa-thio triphosphate (dATPS) is used as a substitute for the natural deoxyadenosine triphosphate (dATP) since it is efficiently used by the DNA polymerase, but not recognized by the luciferase. For detailed information about reaction conditions for the PYROSEQUENCING, see, e.g. U.S. Pat. No. 6,210,891, which is incorporated herein by reference in its entirety.

[0120] Other techniques known to persons skilled in the art are also incorporated for use with the present invention, for example see Kwok, Hum Mut 2002; 9; 315-323 and Kwok, Annu Rev Genomic Hum Genetics, 2001; 2; 235-58 for reviews, which are incorporated herein in their entirety by reference. Examples of other techniques to detect variances and/or polymorphisms are the INVADER® Assay (Gut et al, Hum Mutat, 2001; 17:475-92, Shi et al, Clin Chem, 2001, 47,164-92, and Olivier et al, Mutat Res, 2005; 573:103-110), the method utilizing FLAP endonucleases (U.S. Pat. No. 6,706,476) and the SNPlex genoptyping systems (Tobler et al, J. Biomol Tech, 2005; 16; 398-406.

[0121] In one embodiment, a long-range PCR (LR-PCR) is used to detect mutations or polymorphisms of the present invention. LR-PCR products are genotyped for mutations or polymorphisms using any genotyping methods known to one skilled in the art, and haplotypes inferred using mathematical approaches (e.g., Clark's algorithm (Clark (1990) Mol. Biol. Evol. 7:111-122).

[0122] For example, methods including complementary DNA (cDNA) arrays (Shalon et al., Genome Research 6(7):639-45, 1996; Bernard et al., Nucleic Acids Research 24(8):1435-42, 1996), solid-phase mini-sequencing technique (U.S. Pat. No. 6,013,431, Suomalainen et al. Mol. Biotechnol. June; 15(2):123-31, 2000), ion-pair high-performance liquid chromatography (Doris et al. J. Chromatogr. A can 8; 806(1):47-60, 1998), and 5′ nuclease assay or real-time RT-PCR (Holland et al. Proc Natl Acad Sci USA 88: 7276-7280, 1991), or primer extension methods described in the U.S. Pat. No. 6,355,433, can be used.

[0123] Molecular beacons also contain fluorescent and quenching dyes, but FRET only occurs when the quenching dye is directly adjacent to the fluorescent dye. Molecular beacons are designed to adopt a hairpin structure while free in solution, bringing the fluorescent dye and quencher in close proximity. Therefore, for example, two different molecular beacons are designed, one recognizing the mutation or polymorphism and the other the corresponding wildtype allele. When the molecular beacons hybridize to the nucleic acids, the fluorescent dye and quencher are separated, FRET does not occur, and the fluorescent dye emits light upon irradiation. Unlike TaqMan probes, molecular beacons are designed to remain intact during the amplification reaction, and must rebind to target in every cycle for signal measurement. TaqMan probes and molecular beacons allow multiple DNA species to be measured in the same sample (multiplex PCR), since fluorescent dyes with different emission spectra can be attached to the different probes, e.g. different dyes are used in making the probes for different disease-causing and SNP alleles. Multiplex PCR also allows internal controls to be co-amplified and permits allele discrimination in single-tube assays. (Ambion Inc, Austin, Tex., TechNotes 8(1)—February 2001, Real-time PCR goes prime time).

[0124] Another method to detect mutations or polymorphisms is by using fluorescence tagged dNTP/ddNTPs. In addition to use of the fluorescent label in the solid phase mini-sequencing method, a standard nucleic acid sequencing gel can be used to detect the fluorescent label incorporated into the PCR amplification product. A sequencing primer is designed to anneal next to the base differentiating the disease-causing and normal allele or the selected SNP alleles. A primer extension reaction is performed using chain terminating dideoxyribonucleoside triphosphates (ddNTPs) labeled with a fluorescent dye, one label attached to the ddNTP to be added to the standard nucleic acid and another to the ddNTP to be added to the target nucleic acid.

[0125] Alternatively, an INVADER® assay can be used (Third Wave Technologies, Inc (Madison, Wis.)). This assay is generally based upon a structure-specific nuclease activity of a variety of enzymes, which are used to cleave a target-dependent cleavage structure, thereby indicating the presence of specific nucleic acid sequences or specific variations thereof in a sample (see, e.g. U.S. Pat. No. 6,458,535). For example, an INVADER® operating system (OS), provides a method for detecting and quantifying DNA and RNA. The INVADER® OS is based on a “perfect match” enzyme-substrate reaction. The INVADER® OS uses proprietary CLEAVASE® enzymes (Third Wave Technologies, Inc (Madison, Wis.)), which recognize and cut only the specific structure formed during the INVADER® process which structure differs between the different alleles selected for detection, i.e. the disease-causing allele and the normal allele as well as between the different selected SNPs. Unlike the PCR-based methods, the INVADER® OS relies on linear amplification of the signal generated by the INVADER® process, rather than on exponential amplification of the target.

[0126] In the INVADER® process, two short DNA probes hybridize to the target to form a structure recognized by the CLEAVASE® enzyme. The enzyme then cuts one of the probes to release a short DNA “flap.” Each released flap binds to a fluorescently-labeled probe and forms another cleavage structure. When the CLEAVASE® enzyme cuts the labeled probe, the probe emits a detectable fluorescence signal.

[0127] Mutations or polymophisms can also be detected using allele-specific hybridization followed by a MALDI-TOF-MS detection of the different hybridization products. In the preferred embodiment, the detection of the enhanced or amplified nucleic acids representing the different alleles is performed using matrix-assisted laser desorption ionization/time-of-flight (MALDI-TOF) mass spectrometric (MS) analysis described in the Examples below. This method differentiates the alleles based on their different mass and can be applied to analyze the products from the various above-described primer-extension methods or the INVADER® process.

[0128] In one embodiment, a haplotyping method can be used for the purpose of the invention. A halotyping method is a physical separation of alleles by cloning, followed by sequencing. Other methods of haplotyping include, but are not limited to monoallelic mutation analysis (MAMA) (Papadopoulos et al. (1995) Nature Genet. 11:99-102) and carbon nanotube probes (Woolley et al. (2000) Nature Biotech. 18:760-763). U.S. Patent Application No. US 2002/0081598 also discloses a useful haplotying method which involves the use of PCR amplification.

[0129] Computational algorithms such as expectation-maximization (EM), subtraction and PHASE are useful methods for statistical estimation of haplotypes (see, e.g., Clark, A. G. Inference of haplotypes from PCR-amplified samples of diploid populations. Mol Biol Evol 7, 111-22. (1990); Stephens, M., Smith, N.J. & Donnelly, P. A new statistical method for haplotype reconstruction from population data. Am J Hum Genet 68, 978-89. (2001); Templeton, A. R., Sing, C. F., Kessling, A. & Humphries, S. A cladistic analysis of phenotype associations with haplotypes inferred from restriction endonuclease mapping. II. The analysis of natural populations. Genetics 120, 1145-54. (1988)).

[0130] Other methods for genetic screening can be used within the scope of the present invention, for example, to detect mutations in genomic DNA, cDNA and/or RNA samples. Methods commonly used, or newly developed or methods yet unknown are encompassed for used in the present invention. Examples of newly discovered methods include for example, but are not limited to; SNP mapping (Davis et al, Methods Mol Biology, 2006; 351; 75-92); Nanogen Nano Chip, (keen-Kim et al, 2006; Expert Rev Mol Diagnostic, 6; 287-294); Rolling circle amplification (RCA) combined with circularable oligonucleotide probes (c-probes) for the detection of nucleic acids (Zhang et al, 2006: 363; 61-70), luminex XMAP system for detecting multiple SNPs in a single reaction vessel (Dunbar S A, Clin Chim Acta, 2006; 363; 71-82; Dunbar et al, Methods Mol Med, 2005; 114:147-1471) and enzymatic mutation detection methods (Yeung et al, Biotechniques, 2005; 38; 749-758).

[0131] Methods used to detect point mutations include denaturing gradient gel electrophoresis (“DGGE”), restriction fragment length polymorphism analysis (“RFLP”), chemical or enzymatic cleavage methods, direct sequencing of target regions amplified by PCR (see above), single strand conformation polymorphism analysis (“SSCP”) and other methods well known in the art.

[0132] One method of screening for point mutations is based on RNase cleavage of base pair mismatches in RNA/DNA or RNA/RNA heteroduplexes. As used herein, the term “mismatch” is defined as a region of one or more unpaired or mispaired nucleotides in a double-stranded RNA/RNA, RNA/DNA or DNA/DNA molecule. This definition thus includes mismatches due to insertion/deletion mutations, as well as single or multiple base point mutations.

[0133] In such embodiments, protection from cleavage agents (such as a nuclease, hydroxylamine or osmium tetroxide and with piperidine) can be used to detect mismatched bases in RNA/RNA DNA/DNA, or RNA/DNA heteroduplexes (see, e.g., Myers et al. (1985) Science 230:1242). In general, the technique of “mismatch cleavage” starts by providing heteroduplexes formed by hybridizing a control nucleic acid, which is optionally labeled, e.g., RNA or DNA, comprising a nucleotide sequence of the allelic variant of the gene of interest with a sample nucleic acid, e. g., RNA or DNA, obtained from a tissue sample. The double-stranded duplexes are treated with an agent which cleaves single-stranded regions of the duplex such as duplexes formed based on basepair mismatches between the control and sample strands. For instance, RNA/DNA duplexes can be treated with RNase and DNA/DNA hybrids treated with 51 nuclease to enzymatically digest the mismatched regions. In other embodiments, either DNA/DNA or RNA/DNA duplexes can be treated with hydroxylamine or osmium tetroxide and with piperidine in order to digest mismatched regions. After digestion of the mismatched regions, the resulting material is then separated by size on denaturing polyacrylamide gels to determine whether the control and sample nucleic acids have an identical nucleotide sequence or in which nucleotides they are different. See, for example, U.S. Pat. No. 6,455,249, Cotton et al. (1988) Proc. Natl. Acad. Sci. USA 85:4397; Saleeba et al. (1992) Methods Enzy. 217:286-295. In another embodiment, the control or sample nucleic acid is labeled for detection.

[0134] U.S. Pat. No. 4,946,773 describes an RNaseA mismatch cleavage assay that involves annealing single-stranded DNA or RNA test samples to an RNA probe, and subsequent treatment of the nucleic acid duplexes with RNaseA. For the detection of mismatches, the single-stranded products of the RNaseA treatment, electrophoretically separated according to size, are compared to similarly treated control duplexes. Samples containing smaller fragments (cleavage products) not seen in the control duplex are scored as positive.

[0135] Other investigators have described the use of RNaseI in mismatch assays. The use of RNaseI for mismatch detection is described in literature from Promega Biotech. Promega markets a kit containing RNaseI that is reported to cleave three out of four known mismatches.

[0136] In other embodiments, alterations in electrophoretic mobility can be used to identify the particular allelic variant. For example, single strand conformation polymorphism (SSCP) can be used to detect differences in electrophoretic mobility between mutant and wild type nucleic acids (Orita et al. (1989) Proc Natl. Acad. Sol USA 86:2766; Cotton (1993) Mutat. Res. 285:125-144 and Hayashi (1992) Genet Anal Tech Appl 9:73-79). Single-stranded DNA fragments of sample and control nucleic acids are denatured and allowed to renature. The secondary structure of single-stranded nucleic acids varies according to sequence, the resulting alteration in electrophoretic mobility enables the detection of even a single base change. The DNA fragments can be labeled or detected with labeled probes. The sensitivity of the assay can be enhanced by using RNA (rather than DNA), in which the secondary structure is more sensitive to a change in sequence. In another preferred embodiment, the subject method utilizes heteroduplex analysis to separate double stranded heteroduplex molecules on the basis of changes in electrophoretic mobility (Keen et al. (1991) Trends Genet. 7:5).

[0137] Gel Migration Single strand conformational polymorphism (SSCP; M. Orita et al., Genomics 5:8 74-8 79 (1989); Huinphfies et al., In: Molecular Diagnosis of Genetic Diseases, R. Elles, ed. pp 321-340 (1996)) and temperature gradient gel electrophoresis (TGGE; R. M. Wartell et al., Nucl. Acids Res. 18:2699-2706 (1990)) are examples of suitable gel migration-based methods for determining the identity of a polymorphic site. In SSCP, a single strand of DNA will adopt a conformation that is uniquely dependent of its sequence composition. This conformation is usually different, if even a single base is changed. Thus, certain embodiments of the present invention, SSCP can be utilized to identify polymorphic sites, as wherein amplified products (or restriction fragments thereof of the target polynucleotide are denatured, then run on a non-denaturing gel. Alterations in the mobility of the resultant products are thus indicative of a base change. Suitable controls and knowledge of the “normal” migration patterns of the wild-type alleles can be used to identify polymorphic variants.

[0138] In yet another embodiment, the identity of the allelic variant is obtained by analyzing the movement of a nucleic acid comprising the polymorphic region in polyacrylamide gels containing a gradient of denaturant, which is assayed using denaturing gradient gel electrophoresis (DGGE) (Myers et al. (1985) Nature 313:495). When DGGE is used as the method of analysis, DNA will be modified to insure that it does not completely denature, for, example by adding a GC clamp of approximately 40 bp of high-melting GC rich DNA by PCR. In a further embodiment, a temperature gradient is used in place of a denaturing agent gradient to identify differences in the mobility of control and sample DNA (Rosenbaum and Reissner (1987) Biophys Chem 265:1275).

[0139] Others have described using the MutS protein or other DNA-repair enzymes for detection of single-base mismatches. Alternative methods for detection of deletion, insertion or substitution mutations that can be used in the practice of the present invention are disclosed in U.S. Pat. Nos. 5,849,483, 5,851,770, 5,866,337, 5,925,525 and 5,928,870, each of which is incorporated herein by reference in its entirety. Several methods have been developed to screen polymorphisms and some examples are listed below. The reference of Kwok and Chen (2003) and Kwok (2001) provide overviews of some of these methods, both of these references are specifically incorporated by reference.

[0140] Examples of identifying polymorphisms and applying that information in a way that yields useful information regarding patients can be found, for example, in U.S. Pat. No. 6,472,157; U.S. Patent Application Publications 20020016293, 20030099960, 20040203034; WO 0180896, all of which are hereby incorporated by reference.

[0141] In another embodiment, multiplex PCR procedures using allele-specific primers can be used to simultaneously amplify multiple regions of a target nucleic acid (PCT Application WO89/10414), enabling amplification only if a particular allele is present in a sample. Other embodiments using alternative primer-guided nucleotide incorporation procedures for assaying polymorphic sites in DNA can be used, and have been described (Komher, J. S. et al., Nucl. Acids. Res. 17:7779-7784 (1989); Sokolov, B. P., Nucl. Acids Res. 18:3671 (1990); Syvanen, A.-C., et al., Genomics 8:684-692 (1990); Kuppuswamy, M. N. et al., Proc. Nad. Acad. Sci. (U.S.A) 88:1143-1147 (1991); Bajaj et al. (U.S. Pat. No. 5,846,710); Prezant, T. R. et al., Hum Mutat. 1: 159-164 (1992); Ugozzoli, L. et al., GATA 9:107-112 47 (1992); Nyr6n, P. et al., Anal. Biochem. 208:171-175 (1993)).

[0142] Other known nucleic acid amplification procedures include transcription-based amplification systems (Malek, L. T. et al., U.S. Pat. No. 5,130,238; Davey, C. et al., European Patent Application 329,822; Schuster et al.) U.S. Pat. No. 5,169,766; Miller, H. I. et al., PCT-Application WO89/06700; Kwoh, D. et al., Proc. Natl. Acad Sci. (U.S.A) 86:1173 Z1989); Gingeras, T. R. et al., PCT Application WO88/10315)), or isothermal amplification methods (Walker, G. T. et al., Proc. Natl. 4cad Sci. (U.S.A) 89:392-396 (1992)) can also be used.

[0143] Another method to determine genetic variation is using “gene chips.” Probes can be affixed to surfaces for use as “gene chips.” Such gene chips can be used to detect genetic variations by a number of techniques known to one of skill in the art. In one technique, oligonucleotides are arrayed on a gene chip for determining the DNA sequence of a by the sequencing by hybridization approach, such as that outlined in U.S. Pat. Nos. 6,025,136 and 6,018,041. The probes of the present invention also can be used for fluorescent detection of a genetic sequence. Such techniques have been described, for example, in U.S. Pat. Nos. 5,968,740 and 5,858,659. A probe also can be affixed to an electrode surface for the electrochemical detection of nucleic acid sequences such as described by Kayyem et al. U.S. Pat. No. 5,952,172 and by Kelley, S. O. et al. (1999) Nucleic Acids Res. 27:4830-4837.

[0144] In some embodiments, the probe affixed to the surface of “gene chip” comprises a nucleotide sequence substantially complementary to: (i) GGTCCTCGCCTCC (SEQ ID NO: 2); (ii) GGTCCTAGCCTCC (SEQ ID NO: 3); (iii) GTTTGCCGTGTCG (SEQ ID NO: 4); (iv) GTTTGCTGTGTCG (SEQ ID NO: 5); (v) TCCCAAACTCCTG (SEQ ID NO: 6); (vi) TCCCAACCTCCTG (SEQ ID NO: 7); or (vii) any combinations of (i)-(vi).

[0145] In some embodiments, the probe affixed to the surface of “gene chip” comprises a nucleotide sequence selected from (i) GGTCCTCGCCTCC (SEQ ID NO: 2); (ii) GGTCCTAGCCTCC (SEQ ID NO: 3); (iii) GTTTGCCGTGTCG (SEQ ID NO: 4); (iv) GTTTGCTGTGTCG (SEQ ID NO: 5); (v) TCCCAAACTCCTG (SEQ ID NO: 6); (vi) TCCCAACCTCCTG (SEQ ID NO: 7); or (vii) any combinations of (i)-(vi).

[0146] Provided herein are methods, assays and systems for determining an increased risk for developing late onset AD in a subject by identifying the SNPs described herein or corresponding gene expression products in a biological sample of the subject. The term “biological sample” as used herein denotes a sample taken or isolated from a biological organism, e.g., tissue cell culture supernatant, cell lysate, a homogenate of a tissue sample from a subject or a fluid sample from a subject. Exemplary biological samples include, but are not limited to, blood, sputum, urine, spinal fluid, pleural fluid, nipple aspirates, lymph fluid, the external sections of the skin, respiratory, intestinal, and genitourinary tracts, tears, saliva, milk, feces, sperm, cells or cell cultures, serum, leukocyte fractions, smears, tissue samples of all kinds, embryos, etc. The term also includes both a mixture of the above-mentioned samples such as whole human blood containing mycobacteria as well as food samples that contain free or bound nucleic acids or cells containing nucleic acids. The term “biological sample” also includes untreated or pretreated (or pre-processed) biological samples.

[0147] A “biological sample” can contain cells from subject, but the term can also refer to non-cellular biological material, such as non-cellular fractions of blood, saliva, or urine, that can be used to measure gene expression levels or determine SNPs. In some embodiments, the sample is from a resection, biopsy, or core needle biopsy. In addition, fine needle aspirate samples can be used. Samples can be either paraffin-embedded or frozen tissue.

[0148] The sample can be obtained by removing a sample of cells from a subject, but can also be accomplished by using previously isolated cells (e.g. isolated by another person). In addition, the biological sample can be freshly collected or a previously collected sample. Furthermore, the biological sample can be utilized for the detection of the presence and/or quantitative level of a biomolecule of interest. Representative biomolecules include, but are not limited to, DNA, RNA, mRNA, polypeptides, and derivatives and fragments thereof. In some embodiments, the biological sample can be used for SNP determination for diagnosis of a disease or a disorder, e.g., Alzheimer's disease, using the methods, assays and systems of the invention.

[0149] In some embodiments, biological sample can be a biological fluid. Examples of biological fluids include, but are not limited to, saliva, bone marrow, blood, serum, plasma, urine, sputum, cerebrospinal fluid, an aspirate, tears, and any combinations thereof.

[0150] In some embodiments, the biological sample is an untreated biological sample. As used herein, the phrase “untreated biological sample” refers to a biological sample that has not had any prior sample pre-treatment except for dilution and/or suspension in a solution. Exemplary methods for treating a biological sample include, but are not limited to, centrifugation, filtration, sonication, homogenization, heating, freezing and thawing, and any combinations thereof.

[0151] In some embodiments, the biological sample is a frozen biological sample, e.g., a frozen tissue or fluid sample such as urine, blood, serum or plasma. The frozen sample can be thawed before employing methods, assays and systems of the invention. After thawing, a frozen sample can be centrifuged before being subjected to methods, assays and systems of the invention.

[0152] In some embodiments, the biological fluid sample can be treated with at least one chemical reagent, such as a protease inhibitor. In some embodiments, the biological fluid sample is a clarified biological fluid sample, for example, by centrifugation and collection of a supernatant comprising the clarified biological fluid sample.

[0153] In some embodiments, a biological sample is a pre-processed biological sample, for example, supernatant or filtrate resulting from a treatment selected from the group consisting of centrifugation, filtration, sonication, homogenization, lysis, thawing, amplification, purification, restriction enzyme digestion ligation and any combinations thereof. In some embodiments, a biological sample can be a nucleic acid product amplified after polymerase chain reaction (PCR). The term “nucleic acid” used herein refers to DNA, RNA, or mRNA.

[0154] In some embodiments, the biological sample can be treated with a chemical and/or biological reagent. Chemical and/or biological reagents can be employed to protect and/or maintain the stability of the sample, including biomolecules (e.g., nucleic acid and protein) therein, during processing. One exemplary reagent is a protease inhibitor, which is generally used to protect or maintain the stability of protein during processing. In addition, or alternatively, chemical and/or biological reagents can be employed to release nucleic acid or protein from the sample.

[0155] The skilled artisan is well aware of methods and processes appropriate for pre-processing of biological samples required for determination of SNPs or expression of gene expression products as described herein.

[0156] The methods and assay disclosed herein can be carried out in an automated and/or high-throughput system. Accordingly, in one aspect, the disclosure provides a computer system comprising: (a) a determination module configured to identify and detect at least one single nucleotide polymorphism (SNP) in a biological sample of a subject, wherein the SNP is selected from: (i) SNP1 genotype A/A or A/C (or T/T or T/G in the complement) of SEQ ID NO: 1, wherein SNP1 is identified by rs277472 on SEQ ID NO: 1, wherein SEQ ID NO. 1 is a portion of genomic nucleic acid sequence of plexin A4 (PLXNA4); (ii) SNP2 genotype T/T or T/C (or A/A or A/C in the complement) of SEQ ID NO: 1, wherein SNP2 is position 132,006,366 of SEQ ID NO: 1 identified by rs10236235, wherein SEQ ID NO. 1 is a portion of genomic nucleic acid sequence of PLXNA4; (iii) SNP3 genotype C/C or C/A (or G/G or G/T in the complement) of SEQ ID NO: 1, wherein SNP3 identified by rs11761937 on SEQ ID NO: 1, wherein the SEQ ID NO: 1 is a portion of genomic nucleic acid sequence of PLXNA4; and (iv) any combinations thereof (b) a storage module configured to store output data from the determination module; (c) a computing module adapted to identify from the output data at least one of AD risk associated alleles is present in the output data stored on the storage module; and (d) a display module for displaying if any of the AD risk associated alleles was identified or not, and/or displaying the detected alleles.

[0157] In some embodiments, the computer system can include: (a) at least one memory containing at least one computer program adapted to control the operation of the computer system to implement a method that includes: (i) receiving data of the level of expression or intensity of signal of measured for a PLXNA4 isoform (e.g. TS1 or TS3) mRNA; (ii) generating a report of intensity of expression or intensity of signal of measured PLXNA4 isoform mRNA in a biological sample and optionally a reference level for PLXNA4 isoform mRNA signal intensity; and (b) at least one processor for executing the computer program.

[0158] In some embodiments, a computer system can include: (a) at least one memory containing at least one computer program adapted to control the operation of the computer system to implement a method that includes: (i) receiving data of the level of expression or intensity of signal of measured AD risk associated allele levels (ii) generating a report of intensity of expression or intensity of signal of measured AD risk associated allele levels in a biological sample and optionally a reference level AD risk associated allele signal intensity; and (b) at least one processor for executing the computer program.

[0159] In some embodiments, a computer system can include, for example, an Intel or AMD x86 based single or multi-core central processing unit (CPU), an ARM processor or similar computer processor for processing the data. The CPU or microprocessor can be any conventional general purpose single- or multi-chip microprocessor such as an Intel and AMD processor, a SPARC processor, or an ARM processor. In addition, the microprocessor may be any conventional or special purpose microprocessor such as a digital signal processor or a graphics processor. The microprocessor typically has conventional address lines, conventional data lines, and one or more conventional control lines. As described below, the software according to the invention can be executed on dedicated system or on a general purpose computer having a DOS, CPM, Windows, Unix, Linix or other operating system. The system can include non-volatile memory, such as disk memory and solid state memory for storing computer programs, software and data and volatile memory, such as high speed ram for executing programs and software.

[0160] Computer-readable physical storage media useful in various embodiments of the invention can include any physical computer-readable storage medium, e.g., solid state memory (such as flash memory), magnetic and optical computer-readable storage media and devices, and memory that uses other persistent storage technologies. In some embodiments, a computer readable media can be any tangible media that allows computer programs and data to be accessed by a computer. Computer readable media can include volatile and nonvolatile, removable and non-removable tangible media implemented in any method or technology capable of storing information such as computer readable instructions, program modules, programs, data, data structures, and database information. In some embodiments of the invention, computer readable media includes, but is not limited to, RAM (random access memory), ROM (read only memory), EPROM (erasable programmable read only memory), EEPROM (electrically erasable programmable read only memory), flash memory or other memory technology, CD-ROM (compact disc read only memory), DVDs (digital versatile disks), Blue-ray, USB drives, micro-SD drives, or other optical storage media, magnetic cassettes, magnetic tape, magnetic disk storage or other magnetic storage media, other types of volatile and non-volatile memory, and any other tangible medium which can be used to store information and which can read by a computer including and any suitable combination of the foregoing.

[0161] The present invention can be implemented on a stand-alone computer or as part of a networked computer system. In a stand-alone computer, all the software and data can reside on local memory devices, for example an optical disk or flash memory device can be used to store the computer software for implementing the invention as well as the data. In alternative embodiments, the software or the data or both can be accessed through a network connection to remote devices. In one embodiment, the invention can use a client-server environment over a network, e.g., a public network such as the internet or a private network to connect to data and resources stored in remote and/or centrally located locations. In this embodiment, a server such as a web server can provide access, e.g. open access, pay as you go or subscription based access, to the information provided according to the invention. In a client server environment, a client computer executing a client software or program, such as a web browser, connects to the server over the network. The client software provides a user interface for a user of the invention to input data and information and receive access to data and information. The client software can be viewed on a local computer display or other output device and can allow the user to input information, such as by using a computer keyboard, mouse or other input device. The server executes one or more computer programs that receives data input through the client software, processes data according to the invention and outputs data to the user, as well as provide access to local and remote computer resources. For example, the user interface can include a graphical user interface comprising an access element, such as a text box, that permits entry of data from the assay, e.g., the data from a positive reference cancer cell, as well as a display element that can provide a graphical read out of the results of a comparison with a cancer cell with a known metastatic potential or invasive capacity, or data sets transmitted to or made available by a processor following execution of the instructions encoded on a computer-readable medium.

[0162] Embodiments of the invention also provide for systems (and computer readable medium providing instructions for causing computer systems) to perform a method for determining quality assurance of a pluripotent stem cell population according to the methods as disclosed herein.

[0163] In some embodiments of the invention, the computer system software can include one or more functional modules, which can be defined by computer executable instructions recorded on computer readable media and which cause a computer to perform, when executed, a method according to one or more embodiments of the invention. The modules can be segregated by function for the sake of clarity, however, it should be understood that the modules need not correspond to discreet blocks of code and the described functions can be carried out by the execution of various software code portions stored on various media and executed at various times. Furthermore, it should be appreciated that the modules can perform other functions, thus the modules are not limited to having any particular function or set of functions. In some embodiments, functional modules are, for example, but are not limited to, an array module, a determination module, a storage module, a reference comparison module, a normalization module, and a display module to display the results (e.g., the invasive potential of the test cancer cell population). The functional modules can be executed using one or multiple computers, and by using one or multiple computer networks.

[0164] The information embodied on one or more computer-readable media can include data, computer software or programs, and program instructions, which as a result of being executed by a computer, transform the computer to special purpose machine and can cause the computer to perform one or more of the functions described herein. Such instructions can be originally written in any of a plurality of programming languages, for example, Java, J#, Visual Basic, C, C#, C++, Fortran, Pascal, Eiffel, Basic, COBOL assembly language, and the like, or any of a variety of combinations thereof. The computer-readable media on which such instructions are embodied can reside on one or more of the components of a computer system or a network of computer systems according to the invention.

[0165] In some embodiments, a computer-readable media can be transportable such that the instructions stored thereon can be loaded onto any computer resource to implement the aspects of the present invention discussed herein. In addition, it should be appreciated that the instructions stored on computer readable media are not limited to instructions embodied as part of an application program running on a host computer. Rather, the instructions may be embodied as any type of computer code (e.g., object code, software or microcode) that can be employed to program a computer to implement aspects of the present invention. The computer executable instructions may be written in a suitable computer language or combination of several languages. Basic computational biology methods are known to those of ordinary skill in the art and are described in, for example, Setubal and Meidanis et al., Introduction to Computational Biology Methods (PWS Publishing Company, Boston, 1997); Salzberg, Searles, Kasif, (Ed.), Computational Methods in Molecular Biology, (Elsevier, Amsterdam, 1998); Rashidi and Buehler, Bioinformatics Basics: Application in Biological Science and Medicine (CRC Press, London, 2000) and Ouelette and Bzevanis Bioinformatics: A Practical Guide for Analysis of Gene and Proteins (Wiley & Sons, Inc., 2^{nd} ed., 2001).

[0166] Where the quantity to be measured is protein expression, the system as disclosed herein can be configured to receive data from an automated protein analysis systems, for example, using immunoassay, for example western blot analysis or ELISA, or a high through-put protein detection method, for example but are not limited to automated immunohistochemistry apparatus, for example, robotically automated immunodetection apparatus which in an automated system can perform immunohistochemistry procedure and detect intensity of immunostaining, such as intensity of an antibody staining of the substrates and produce output data. Examples of such automated immunohistochemistry apparatus are commercially available, and can be readily adapted to automatically detect the level of protein expression in the assay as disclosed herein, and include, for example but not limited to such Autostainers 360, 480, 720 and Labvision PT module machines from LabVision Corporation, which are disclosed in U.S. Pat. Nos. 7,435,383; 6,998,270; 6,746,851, 6,735,531; 6,349,264; and 5,839; 091 which are incorporated herein in their entirety by reference. Other commercially available automated immunohistochemistry instruments are also encompassed for use in the present invention, for example, but not are limited BOND™ Automated Immunohistochemistry & In Situ Hybridization System, Automate slide loader from GTI vision. Automated analysis of immunohistochemistry can be performed by commercially available systems such as, for example, IHC Scorer and Path EX, which can be combined with the Applied spectral Images (ASI) CytoLab view, also available from GTI vision or Applied Spectral Imaging (ASI) which can all be integrated into data sharing systems such as, for example, Laboratory Information System (LIS), which incorporates Picture Archive Communication System (PACS), also available from Applied Spectral Imaging (ASI) (see world-wide-web: spectral-imaging.com). Other a determination module can be an automated immunohistochemistry systems such as NexES® automated immunohistochemistry (IHC) slide staining system or BenchMark® LT automated IHC instrument from Ventana Discovery SA, which can be combined with VIAS™ image analysis system also available Ventana Discovery. BioGenex Super Sensitive MultiLink® Detection Systems, in either manual or automated protocols can also be used as the detection module, preferably using the BioGenex Automated Staining Systems. Such systems can be combined with a BioGenex automated staining systems, the i6000™ (and its predecessor, the OptiMax® Plus), which is geared for the Clinical Diagnostics lab, and the GenoMx 6000™, for Drug Discovery labs. Both systems BioGenex systems perform “All-in-One, All-at-Once” functions for cell and tissue testing, such as Immunohistochemistry (IHC) and In Situ Hybridization (ISH).

[0167] In some embodiments, a system as disclosed herein, can receive data of intensity of protein expression of PLXNA4 from an automated ELISA system (e.g. DSX® or DK® form Dynax, Chantilly, Va. or the ENEASYSTEM III®, Triturus®, The Mago® Plus); Densitometers (e.g. X-Rite-508-Spectro Densitometer®, The HYRYS™ 2 densitometer); automated Fluorescence in situ hybridization systems (see for example, U.S. Pat. No. 6,136,540); 2D gel imaging systems coupled with 2-D imaging software; microplate readers; Fluorescence activated cell sorters (FACS) (e.g. Flow Cytometer FACSVantage SE, Becton Dickinson); radio isotope analyzers (e.g. scintillation counters), or adapted systems thereof for detecting cells on the separated substrates as disclosed herein.

[0168] In some embodiments, a system as disclosed herein, can receive data can receive data of intensity of mRNA expression of PLXNA4 (e.g., isoform TS1 or TS3) or presence of absence of an AD risk associated allele from any method of determining gene or nucleic acid expression or mutations or SNP genotyping. In some embodiments, the system as disclosed herein can be configured to receive data from an automated gene expression analysis system, e.g., an automated protein expression analysis including but not limited Mass Spectrometry systems including MALDI-TOF, or Matrix Assisted Laser Desorption Ionization—Time of Flight systems; SELDI-TOF-MS ProteinChip array profiling systems, e.g. Machines with Ciphergen Protein Biology System II™ software; systems for analyzing gene expression data (see for example U.S. 2003/0194711); systems for array based expression analysis, for example HT array systems and cartridge array systems available from Affymetrix (Santa Clara, Calif. 95051) AutoLoader, Complete GeneChip® Instrument System, Fluidics Station 450, Hybridization Oven 645, QC Toolbox Software Kit, Scanner 3000 7G, Scanner 3000 7G plus Targeted Genotyping System, Scanner 3000 7G Whole-Genome Association System, GeneTitan™ Instrument, GeneChip® Array Station, HT Array.

[0169] In some embodiments of the present invention, an automated gene expression analysis system can record the data electronically or digitally, annotated and retrieved from databases including, but not limited to GenBank (NCBI) protein and DNA databases such as genome, ESTs, SNPS, Traces, Celara, Ventor Reads, Watson reads, HGTS, etc.; Swiss Institute of Bioinformatics databases, such as ENZYME, PROSITE, SWISS-2DPAGE, Swiss-Prot and TrEMBL databases; the Melanie software package or the ExPASy WWW server, etc., the SWISS-MODEL, Swiss-Shop and other network-based computational tools; the Comprehensive Microbial Resource database (The institute of Genomic Research). The resulting information can be stored in a relational data base that may be employed to determine homologies between the reference data or genes or proteins within and among genomes.

[0170] In some embodiments, a system as disclosed herein, can receive data from an allele-specific PCR. The term “allele-specific PCR” refers to PCR techniques where the primer pairs are chosen such that amplification is dependent upon the input template nucleic acid containing the polymorphism of interest. In such embodiments, primer pairs are chosen such that at least one primer is an allele-specific oligonucleotide primer. In some sub-embodiments of the present invention, allele-specific primers are chosen so that amplification creates a restriction site, facilitating identification of a polymorphic site. In other embodiments of the present invention, amplification of the target polynucleotide is by multiplex PCR (Wallace et al. (PCT Application WO89/10414)). Through the use of multiplex PCR, a multiplicity of regions of a target polynucleotide can be amplified simultaneously. This is particularly advantageous in embodiments where more than one SNP is to be detected.

[0171] In another embodiment, multiplex PCR procedures using allele-specific primers can be used to simultaneously amplify multiple regions of a target nucleic acid (PCT Application WO89/10414), enabling amplification only if a particular allele is present in a sample. Other embodiments using alternative primer-guided nucleotide incorporation procedures for assaying polymorphic sites in DNA can be used, and have been described (Komher, J. S. et al., Nucl. Acids. Res. 17:7779-7784 (1989); Sokolov, B. P., Nucl. Acids Res. 18:3671 (1990); Syvanen, A.-C., et al., Genomics 8:684-692 (1990); Kuppuswamy, M. N. et al., Proc. Nad. Acad. Sci. (U.S.A) 88:1143-1147 (1991); Bajaj et al. (U.S. Pat. No. 5,846,710); Prezant, T. R. et al., Hum Mutat. 1: 159-164 (1992); Ugozzoli, L. et al., GATA 9:107-112 47 (1992); Nyr6n, P. et al., Anal. Biochem. 208:171-175 (1993)).

[0172] Other known nucleic acid amplification procedures include transcription-based amplification systems (Malek, L. T. et al., U.S. Pat. No. 5,130,238; Davey, C. et al., European Patent Application 329,822; Schuster et al.) U.S. Pat. No. 5,169,766; Miller, H. I. et al., PCT-Application WO89/06700; Kwoh, D. et al., Proc. Natl. Acad Sci. (U.S.A) 86:1173 Z1989); Gingeras, T. R. et al., PCT Application WO88/10315)), or isothermal amplification methods (Walker, G. T. et al., Proc. Natl. 4cad Sci. (U.S.A) 89:392-396 (1992)) can also be used.

[0173] In some embodiments, a system as disclosed herein, can receive data from any genotyping assay known by persons of ordinary skill in the art, including, but not limited to, those disclosed in U.S. Pat. No. 6,472,157; U.S. Patent Application Publications 20020016293, 20030099960, 20040203034; WO 0180896, all of which are hereby incorporated by reference, or by linkage disequlibrium, restriction fragment length polymorphism” (RFLP) analysis, single strand conformational polymorphism (SSCP), RNaseI for mismatch detection, SNP mapping (Davis et al, Methods Mol Biology, 2006; 351; 75-92); Nanogen Nano Chip, (keen-Kim et al, 2006; Expert Rev Mol Diagnostic, 6; 287-294); Rolling circle amplification (RCA) combined with circularable oligonucleotide probes (c-probes) for the detection of nucleic acids (Zhang et al, 2006: 363; 61-70), luminex XMAP system for detecting multiple SNPs in a single reaction vessel (Dunbar S A, Clin Chim Acta, 2006; 363; 71-82; Dunbar et al, Methods Mol Med, 2005; 114:147-1471), enzymatic mutation detection methods (Yeung et al, Biotechniques, 2005; 38; 749-758), matrix-assisted laser desorption ionization/time-of-flight (MALDI-TOF) mass spectrometric (MS) analysis, long-range PCR (LR-PCR), genotype assays disclosed in Kwok, Hum Mut 2002; 9; 315-323 and Kwok, Annu Rev Genomic Hum Genetics, 2001; 2; 235-58, (which are incorporated herein in their entirety by reference), INVADER® Assay (Gut et al, Hum Mutat, 2001; 17:475-92, Shi et al, Clin Chem, 2001, 47,164-92, and Olivier et al, Mutat Res, 2005; 573:103-110), the method utilizing FLAP endonucleases (U.S. Pat. No. 6,706,476) and the SNPlex genoptyping systems (Tobler et al, J. Biomol Tech, 2005; 16; 398-406) and other such genotyping assays known to one of ordinary skill in the art.

[0174] In some embodiments, the data can be received from a memory, a storage device, or a database. The memory, storage device or database can be directly connected to the computer system retrieving the data, or connected to the computer through a wired or wireless connection technology and retrieved from a remote device or system over the wired or wireless connection. Further, the memory, storage device or database, can be located remotely from the computer system from which it is retrieved.

[0175] Examples of suitable connection technologies for use with the present invention include, for example parallel interfaces (e.g., PATA), serial interfaces (e.g., SATA, USB, Firewire, local area networks (LAN), wide area networks (WAN), Internet, Intranet, and Extranet, and wireless (e.g., Blue Tooth, Zigbee, WiFi, WiMAX, 3G, 4G) communication technologies

[0176] Storage devices are also commonly referred to in the art as “computer-readable physical storage media” which is useful in various embodiments, and can include any physical computer-readable storage medium, e.g., magnetic and optical computer-readable storage media, among others. Carrier waves and other signal-based storage or transmission media are not included within the scope of storage devices or physical computer-readable storage media encompassed by the term and useful according to the invention. The storage device is adapted or configured for having recorded thereon cytosine level information. Such information can be provided in digital form that can be transmitted and read electronically, e.g., via the Internet, on diskette, via USB (universal serial bus) or via any other suitable mode of communication.

[0177] As used herein, “stored” refers to a process for recording information, e.g., data, programs and instructions, on the storage device that can be read back at a later time. Those skilled in the art can readily adopt any of the presently known methods for recording information on known media to contribute to the data of (i) the level of expression of a PLXNA4 isoform (TS1 or TS3) mRNA and/or (ii) presence or absence of an AD risk associated allele as disclosed in the methods herein.

[0178] A variety of software programs and formats can be used to store information on the storage device. Any number of data processor structuring formats (e.g., text file or database) can be employed to obtain or create a medium having recorded scorecard thereon.

[0179] In some embodiment, the system has a processor for running one or more programs, e.g., where the programs can include an operating system (e.g., UNIX, Windows), a relational database management system, an application program, and a World Wide Web server program. The application program can be a World Wide Web application that includes the executable code necessary for generation of database language statements (e.g., Structured Query Language (SQL) statements). The executable can include embedded SQL statements. In addition, the World Wide Web application can include a configuration file which contains pointers and addresses to the various software entities that provide the World Wide Web server functions as well as the various external and internal databases which can be accessed to service user requests. The Configuration file can also direct requests for server resources to the appropriate hardware devices, as may be necessary should the server be distributed over two or more separate computers. In one embodiment, the World Wide Web server supports a TCP/IP protocol. Local networks such as this are sometimes referred to as “Intranets.” An advantage of such Intranets is that they allow easy communication with public domain databases residing on the World Wide Web (e.g., the GenBank or Swiss Pro World Wide Web site). Thus, in a particular preferred embodiment of the present invention, users can directly access data (via Hypertext links for example) residing on Internet databases using a HTML interface provided by Web browsers and Web servers.

[0180] In one embodiment, the system as disclosed herein can be used to compare the data of intensity of one or more of (i) the level of expression of PLXNA4 mRNA (e.g. isoform TS1 or TS3); and (ii) presence of an AD risk associated allele; and generate a report of the presence or absence, or amount of (i) the expression of the PLXNA4 mRNA; (ii) the AD risk associated allele with reference data (e.g., reference intensity values), as disclosed herein.

[0181] In some embodiments of this aspect and all other aspects of the present invention, the system can compare the data in a “comparison module” which can use a variety of available software programs and formats for the comparison operative to compare sequence information determined in the determination module to reference data. In one embodiment, the comparison module is configured to use pattern recognition techniques to compare levels of expression (e.g., mRNA levels and/or protein levels) as well as compare sequence information (e.g., identify the presence of different SNPs of AD risk associated alleles from one or more entries to one or more reference data patterns. The comparison module can be configured using existing commercially-available or freely-available software for comparing patterns, and may be optimized for particular data comparisons that are conducted. The comparison module can also provide computer readable information related to the level or amount of intensity of expression of the level of expression of a specific PLXNA4 isoform (e.g., TS1 or TS3) mRNA.

[0182] By providing data of the intensity of expression of (i) the level of expression of a PLXN4 isoform mRNA; and/or (ii) presence of an AD risk associated allele, in computer-readable form, one can use the data to compare with data within the storage device. For example, search programs can be used to identify relevant reference that match the same pattern. The comparison made in computer-readable form provides computer readable content which can be processed by a variety of means. The content can be retrieved from the comparison module, the retrieved content.

[0183] In some embodiments, the comparison module provides computer readable comparison result that can be processed in computer readable form by predefined criteria, or criteria defined by a user, to provide a report which comprises content based in part on the comparison result that may be stored and output as requested by a user using a display module. In some embodiments, a display module enables display of a content based in part on the comparison result for the user, wherein the content is a report indicative of the results of the comparison of the intensity of expression of (i) the level of expression of a PLXNA4 isoform mRNA; and/or (ii) presence of an AD risk associated allele with their respective reference values.

[0184] In some embodiments, the display module enables display of a report or content based in part on the comparison result for the end user, wherein the content is a report indicative of the results of the comparison of the intensity of expression of any one or more of (i) the level of expression of PLXNA4 isoform (e.g., TS1 or TS2) mRNA; and/or (ii) presence of an AD risk associated allele.

[0185] In some embodiments, the comparison module, or any other module of the invention, can include an operating system (e.g., UNIX, Windows) on which runs a relational database management system, a World Wide Web application, and a World Wide Web server. World Wide Web application can includes the executable code necessary for generation of database language statements [e.g., Standard Query Language (SQL) statements]. The executables can include embedded SQL statements. In addition, the World Wide Web application may include a configuration file which contains pointers and addresses to the various software entities that comprise the server as well as the various external and internal databases which must be accessed to service user requests. The Configuration file also directs requests for server resources to the appropriate hardware—as may be necessary should the server be distributed over two or more separate computers. In one embodiment, the World Wide Web server supports a TCP/IP protocol. Local networks such as this are sometimes referred to as “Intranets.” An advantage of such Intranets is that they allow easy communication with public domain databases residing on the World Wide Web (e.g., the GenBank or Swiss Pro World Wide Web site). Thus, in a particular preferred embodiment of the present invention, users can directly access data (via Hypertext links for example) residing on Internet databases using an HTML interface provided by Web browsers and Web servers. In other embodiments of the invention, other interfaces, such as HTTP, FTP, SSH and VPN based interfaces can be used to connect to the Internet databases.

[0186] In some embodiments, a computer-readable media can be transportable such that the instructions stored thereon, such as computer programs and software, can be loaded onto any computer resource to implement the aspects of the present invention discussed herein. In addition, it should be appreciated that the instructions stored on the computer-readable medium, described above, are not limited to instructions embodied as part of an application program running on a host computer. Rather, the instructions may be embodied as any type of computer code (e.g., software or microcode) that can be employed to program a processor to implement aspects of the present invention. The computer executable instructions can be written in a suitable computer language or combination of several languages. Basic computational biology methods are described in, e.g. Setubal and Meidanis et al., Introduction to Computational Biology Methods (PWS Publishing Company, Boston, 1997); Salzberg, Searles, Kasif, (Ed.), Computational Methods in Molecular Biology, (Elsevier, Amsterdam, 1998); Rashidi and Buehler, Bioinformatics Basics: Application in Biological Science and Medicine (CRC Press, London, 2000) and Ouelette and Bzevanis Bioinformatics: A Practical Guide for Analysis of Gene and Proteins (Wiley & Sons, Inc., 2nd ed., 2001).

[0187] The computer instructions can be implemented in software, firmware or hardware and include any type of programmed step undertaken by modules of the information processing system. The computer system can be connected to a local area network (LAN) or a wide area network (WAN). One example of the local area network can be a corporate computing network, including access to the Internet, to which computers and computing devices comprising the data processing system are connected. In one embodiment, the LAN uses the industry standard Transmission Control Protocol/Internet Protocol (TCP/IP) network protocols for communication. Transmission Control Protocol Transmission Control Protocol (TCP) can be used as a transport layer protocol to provide a reliable, connection-oriented, transport layer link among computer systems. The network layer provides services to the transport layer. Using a two-way handshaking scheme, TCP provides the mechanism for establishing, maintaining, and terminating logical connections among computer systems. TCP transport layer uses IP as its network layer protocol. Additionally, TCP provides protocol ports to distinguish multiple programs executing on a single device by including the destination and source port number with each message. TCP performs functions such as transmission of byte streams, data flow definitions, data acknowledgments, lost or corrupt data re-transmissions, and multiplexing multiple connections through a single network connection. Finally, TCP is responsible for encapsulating information into a datagram structure. In alternative embodiments, the LAN can conform to other network standards, including, but not limited to, the International Standards Organization's Open Systems Interconnection, IBM's SNA, Novell's Netware, and Banyan VINES.

[0188] In some embodiments, the computer system as described herein can include any type of electronically connected group of computers including, for instance, the following networks: Internet, Intranet, Local Area Networks (LAN) or Wide Area Networks (WAN). In addition, the connectivity to the network may be, for example, remote modem, Ethernet (IEEE 802.3), Token Ring (IEEE 802.5), Fiber Distributed Datalink Interface (FDDI) or Asynchronous Transfer Mode (ATM). The computing devices can be desktop devices, servers, portable computers, hand-held computing devices, smart phones, set-top devices, or any other desired type or configuration. As used herein, a network includes one or more of the following, including a public internet, a private internet, a secure internet, a private network, a public network, a value-added network, an intranet, an extranet and combinations of the foregoing.

[0189] In some embodiments, a comparison module provides computer readable data that can be processed in computer readable form by predefined criteria, or criteria defined by a user, to provide a retrieved content that may be stored and output as requested by a user using a display module.

[0190] In some embodiments, the computerized system can include or be operatively connected to an output module. In some embodiments, the output module is a display module, such as computer monitor, touch screen or video display system. The display module allows user instructions to be presented to the user of the system, to view inputs to the system and for the system to display the results to the user as part of a user interface. Optionally, the computerized system can include or be operative connected to a printing device for producing printed copies of information output by the system.

[0191] In some embodiments, the results can be displayed on a display module or printed in a report, e.g., a to indicate any one or more of (i) the level of expression of a PLXNA4 isoform (e.g., TS1 or TS3) mRNA; and/or (ii) presence of at least one AD risk associated allele. In some embodiments, the report is a hard copy printed from a printer.

[0192] In alternative embodiments, the computerized system can use light or sound to report the result. For example, in all aspects of the invention, the report produced by the methods, assays, systems and kits as disclosed herein can comprise a report which is color coded to signal or indicate any one or more of (i) the level of expression of a PLXNA4 (eg., isoform TS1 or TS3) mRNA; and/or (ii) presence of at least one AD risk associated allele.

[0193] In some embodiments, the report can also present text, either verbally or written, giving a recommendation of if a subject is amenable to treatment with a TS1 PLXNA4 inhibitory agent as disclosed herein. In other embodiments, the report provides just values or numerical scores for the presence of any one or more of the (i) the level of expression of PLXNA4 mRNA; and/or (ii) presence of at least one AD risk associated allele which can be readily compared by a physician with reference values as disclosed herein.

[0194] In some embodiments, the report data from the comparison module can be displayed on a computer monitor as one or more pages of the printed report. In one embodiment of the invention, a page of the retrieved content can be displayed through printable media. The display module can be any device or system adapted for display of computer readable information to a user. The display module can include speakers, cathode ray tubes (CRTs), plasma displays, light-emitting diode (LED) displays, liquid crystal displays (LCDs), printers, vacuum florescent displays (VFDs), surface-conduction electron-emitter displays (SEDs), field emission displays (FEDs), etc.

[0195] In some embodiments, a World Wide Web browser can be used to provide a user interface to allow the user to interact with the system to input information, construct requests and to display retrieved content. In addition, the various functional modules of the system can be adapted to use a web browser to provide a user interface. Using a Web browser, a user can construct requests for retrieving data from data sources, such as data bases and interact with the comparison module to perform comparisons and pattern matching. The user can point to and click on user interface elements such as buttons, pull down menus, scroll bars, etc. conventionally employed in graphical user interfaces to interact with the system and cause the system to perform the methods of the invention. The requests formulated with the user's Web browser can be transmitted over a network to a Web application that can process or format the request to produce a query of one or more database that can be employed to provide the pertinent information.

[0196] The present disclosure further provides methods for treating AD in a subject. In accordance with embodiments of the various aspects disclosed herein, PLXNA4 is a viable target for therapeutic treatment of AD. Accordingly, provided herein is a method for treatment of AD in a subject. Generally the method comprises administering to the subject a pharmaceutically acceptable composition comprising a TS1 PLXNA4 inhibitory agent.

[0197] Subjects amenable to methods of treatment are subjects that have been diagnosed with Alzheimer's disease. Methods for diagnosing Alzheimer's disease are well known in the art. For example, the stage of Alzheimer's disease can be assessed using the Functional Assessment Staging (FAST) scale, which divides the progression of Alzheimer's disease into 16 successive stages under 7 major headings of functional abilities and losses: Stage 1 is defined as a normal adult with no decline in function or memory. Stage 2 is defined as a normal older adult who has some personal awareness of functional decline, typically complaining of memory deficit and forgetting the names of familiar people and places. Stage 3 (early Alzheimer's disease) manifests symptoms in demanding job situation, and is characterized by disorientation when traveling to an unfamiliar location; reports by colleagues of decreased performance; name- and word-finding deficits; reduced ability to recall information from a passage in a book or to remember a name of a person newly introduced to them; misplacing of valuable objects; decreased concentration. In stage 4 (mild Alzheimer's Disease), the patient may require assistance in complicated tasks such as planning a party or handling finances, exhibits problems remembering life events, and has difficulty concentrating and traveling. In stage 5 (moderate Alzheimer's disease), the patient requires assistance to perform everyday tasks such as choosing proper attire. Disorientation in time, and inability to recall important information of their current lives, occur, but patient can still remember major information about themselves, their family and others. In stage 6 (moderately severe Alzheimer's disease), the patient begins to forget significant amounts of information about themselves and their surroundings and require assistance dressing, bathing, and toileting. Urinary incontinence and disturbed patterns of sleep occur. Personality and emotional changes become quite apparent, and cognitive abulia is observed. In stage 7 (severe Alzheimer's disease), speech ability becomes limited to just a few words and intelligible vocabulary may be limited to a single word. A patient can lose the ability to walk, sit up, or smile, and eventually cannot hold up the head.

[0198] Other alternative diagnostic methods for AD include, but not limited to, cellular and molecular testing methods disclosed in U.S. Pat. No. 7,771,937, U.S. Pat. No. 7,595,167, US 55580748, and PCT Application No.: WO2009/009457, the content of which is incorporated by reference in its entirety. Additionally, protein-based biomarkers for AD, some of which can be detected by non-invasive imaging, e.g., PET, are disclosed in U.S. Pat. No. 7,794,948, the content of which is incorporated by reference in its entirety.

[0199] Genes involved in AD risk can be used for diagnosis of AD, including the SNPs described herein. Accordingly, in one embodiment, the methods provided herein for identifying a nucleic acid polymorphism in a biological sample can also be used for screening AD in a subject. Such AD “risk genes” increase the risk of developing AD. In addition, one example of other AD risk genes is apolipoprotein E-ε4 (APOE-ε4). APOE-ε4 is one of three common forms, or alleles, of the APOE gene; the others are APOE-e2 and APOE-e3. APOE provides the blueprint for one of the proteins that carries cholesterol in the bloodstream. Everyone inherits a copy of some form of APOE from each parent. Those who inherit one copy of APOE-ε4 have an increased risk of developing AD. Those who inherit two copies have an even higher risk, but not a certainty of developing AD. In addition to raising risk, APOE-ε4 may tend to make symptoms appear at a younger age than usual. Other AD risk genes in addition to APOE-e4 are well established in the art. Some of them are disclosed in US Pat. App. No.: US 2010/0249107, US 2008/0318220, US 2003/0170678 and PCT Application No.: WO 2010/048497, the content of which is incorporated by reference in its entirety. Genetic tests are well established in the art and are available, for example for APOE-e4. A subject carrying the APOE-ε4 allele can, therefore, be identified as a subject at risk of developing AD.

[0200] In further embodiments, subjects with Aβ burden are amenable to the methods described herein. Such subjects include, but not limited to, the ones with Down syndrome, Huntington disease, the unaffected carriers of APP or presenilin gene mutations, and the late onset AD risk factor, apolipoprotein E-ε4.

[0201] In some embodiments, AD patients that are currently receiving other AD therapeutic treatment can also be subjected to the methods of treatment as described herein.

[0202] In some embodiments, a subject who has been diagnosed with an increased risk for developing AD, e.g., using the diagnostic methods and assays described herein or any AD diagnostic methods known in the art, can be subjected to the methods of treatment as described herein.

[0203] In some embodiments, the subject with at least one AD risk-associated allele but no AD symptoms, including undetectable level of amyloid-beta protein in the brain and/or no detectable cognitive impairment can be administered with a preventive treatment. These treatment of prevention interventions include, but are not limited to life style advice, including e.g., prescribing an aerobic exercise regime to exercise the body and/or mental exercises to keep brain active, dietary advice, including increase in intake of omega-3 fatty acids, fruits and vegetables, fish or poultry, whole-grain breads and cereals, or reduction of sugar or cholesterol rich food intake to lower cholesterol, and administering pharmaceutical agents effective in prevention or treatment of AD.

[0204] In some embodiments, the subject having at least one AD risk-associated allele and exhibiting AD symptoms, i.e. diagnosed with AD, can be treated with the methods of treatment described herein. In some embodiments, the subject diagnosed with AD can be treated with a drug known in the art such as cholinesterase inhibitors (for example, ARICEPT®), the glutamate antagonist NAMENDA® and dimebolin, which is currently in clinical trials. The subject diagnosed with AD can further be advised on changes in life style and/or diet to slow down the progression of AD. Accordingly, the term “treatment or prevention for AD” will encompass treating a subject diagnosed with AD to slow down or ameliorate at least one symptom associated with AD, or treating a subject with an increased risk for AD, e.g, carrying an AD risk associated allele described herein to avoid or delay the onset of AD. The term “prevention” as used herein refers to a complete avoidance of symptoms, such as cognitive impairment or measurable markers of AD, level of Aβ in the brain, or delay the onset of AD. Inhibition of AD development is also considered a preventive measure even if it does not confer a complete avoidance of AD symptoms. The term “inhibition” as used in reference to the development of a disease (e.g., AD) refer to a reduced severity or degree of any one or more of those symptoms or markers, relative to those symptoms or markers arising in a control or non-treated individual with a similar likelihood or susceptibility of developing AD, or relative to symptoms or markers likely to arise based on historical or statistical measures of populations affected by AD. By “reduced severity” is meant at least about 20% in the severity or degree of a symptom or measurable marker, e.g., level of Aβ in the brain, relative to a control, such as without administration of the treatment described herein, e.g., at least about 20%, 30%, 40%, 50%, 60%, 70%, 80%, 90%, 95%, 99% or even 100% (i.e., no or non-detectable level of cognitive impairment or measurable markers, e.g., Aβ level).

[0205] In another aspect, the disclosure provides kits for the practice of the assays and methods disclosed herein. The kits preferably include one or more containers containing a TS1 PLXNA4 inhibitory agent and a pharmaceutically acceptable excipient. The kit can optionally contain additional therapeutics to be co-administered with the TS1 PLXNA4 inhibitory agent. The kit can comprise instructions for administration of the TS1 PLXNA4 inhibitory agent to a subject with AD or at risk of AD.

[0206] The kits can also optionally include appropriate systems (e.g. opaque containers) or stabilizers (e.g. antioxidants) to prevent degradation of the TS1 PLXNA4 inhibitory agent by light or other adverse conditions.

[0207] Another aspect relates to kit to detect the presence of one or more of: (i) SNP1 genotype A/A or A/C (or T/T or T/G in the complement) of SEQ ID NO: 1, wherein SNP1 is identified by rs277472 on SEQ ID NO: 1, wherein SEQ ID NO. 1 is a portion of genomic nucleic acid sequence of plexin A4 (PLXNA4); (ii) SNP2 genotype T/T or T/C (or A/A or A/C in the complement) of SEQ ID NO: 1, wherein SNP2 is position 132,006,366 of SEQ ID NO: 1 identified by rs10236235, wherein SEQ ID NO. 1 is a portion of genomic nucleic acid sequence of PLXNA4; (iii) SNP3 genotype C/C or C/A (or G/G or G/T in the complement) of SEQ ID NO: 1, wherein SNP3 identified by rs11761937 on SEQ ID NO: 1, wherein the SEQ ID NO. 1 is a portion of genomic nucleic acid sequence of PLXNA4; and (iv) any combinations thereof, in a subject.

[0208] In some embodiments, the kit can comprise probes, e.g., allele-specific oligonucleotide probes or allele specific primer probes for detecting the SNP1, SNP2, and/or SNP3 loci in a sample from a subject. In some embodiments, the kit can comprise probes, e.g., allele-specific oligonucleotide probes or allele specific primer probes for detecting one or more of: (i) SNP1 genotype A/A or A/C (or T/T or T/G in the complement) of SEQ ID NO: 1, wherein SNP1 is identified by rs277472 on SEQ ID NO: 1, wherein SEQ ID NO. 1 is a portion of genomic nucleic acid sequence of plexin A4 (PLXNA4); (ii) SNP2 genotype T/T or T/C (or A/A or A/C in the complement) of SEQ ID NO: 1, wherein SNP2 is position 132,006,366 of SEQ ID NO: 1 identified by rs10236235, wherein SEQ ID NO. 1 is a portion of genomic nucleic acid sequence of PLXNA4; (iii) SNP3 genotype C/C or C/A (or G/G or G/T in the complement) of SEQ ID NO: 1, wherein SNP3 identified by rs11761937 on SEQ ID NO: 1, wherein the SEQ ID NO. 1 is a portion of genomic nucleic acid sequence of PLXNA4; and (iv) any combinations thereof, for the practice of the methods of this invention.

[0209] Allele-specific probes are well know by persons of ordinary skill in the art, with oligonucleotides encompassed for use as probes, and refer to such as genomic DNA, mRNA, or other suitable sources of nucleic acid oligonucleotides. For such purposes, the oligonucleotides must be capable of specifically hybridizing to a target polynucleotide or DNA nucleic acid molecule. As used herein, two nucleic acid molecules are said to be capable of specifically hybridizing to one another if the two molecules are capable of forming an anti-parallel, double-stranded nucleic acid structure under hybridizing conditions.

[0210] The term “allele-specific oligonucleotide” or “ASO” refers to an oligonucleotide that is able to hybridize to a region of a target polynucleotide spanning the sequence, mutation, or polymorphism being detected and is substantially unable to hybridize to a corresponding region of a target polynucleotide that either does not contain the sequence, mutation, or polymorphism being detected or contains an altered sequence, mutation, or polymorphism. As will be appreciated by those in the art, allele-specific is not meant to denote an absolute condition. Allele-specificity will depend upon a variety of environmental conditions, including salt and formamide concentrations, hybridization and washing conditions and stringency. Depending on the sequences being analyzed, one or more allele-specific oligonucleotides can be employed for each target polynucleotide. Preferably, allele-specific oligonucleotides will be completely complementary to the target polynucleotide. However, departures from complete complementarity are permissible. In order for an oligonucleotide to serve as a primer oligonucleotide, however, it typically need only be sufficiently complementary in sequence to be able to form a stable double-stranded structure under the particular environmental conditions employed. Establishing environmental conditions typically involves selection of solvent and salt concentration, incubation temperatures, and incubation times.

[0211] In some embodiments, the ASO comprises a nucleotide sequence substantially complementary to: (i) GGTCCTCGCCTCC (SEQ ID NO: 2); (ii) GGTCCTAGCCTCC (SEQ ID NO: 3); (iii) GTTTGCCGTGTCG (SEQ ID NO: 4); (iv) GTTTGCTGTGTCG (SEQ ID NO: 5); (v) TCCCAAACTCCTG (SEQ ID NO: 6); (vi) TCCCAACCTCCTG (SEQ ID NO: 7); or (vii) any combinations of (i)-(vi).

[0212] In some embodiments, the ASO comprises a nucleotide sequence selected from (i) GGTCCTCGCCTCC (SEQ ID NO: 2); (ii) GGTCCTAGCCTCC (SEQ ID NO: 3); (iii) GTTTGCCGTGTCG (SEQ ID NO: 4); (iv) GTTTGCTGTGTCG (SEQ ID NO: 5); (v) TCCCAAACTCCTG (SEQ ID NO: 6); (vi) TCCCAACCTCCTG (SEQ ID NO: 7); or (vii) any combinations of (i)-(vi).

[0213] In some embodiments, the kit can be used to perform a genotyping assay used to determine the AD risk associated SNPs disclosed herein, where the genotyping assay is selected from any or a combination in the group consisting of: PCR-based assays, RT-PCR, nucleic acid hybridization, sequence analysis, TaqMan SNP genotyping probes, microarrays, direct or indirect sequencing, restriction site analysis, hybridization based genotyping assays, gel migration assays, antibodies assays, fluorescent polarization, mass spectroscopy, allele-specific PCR, single-strand conformational polymorphism (SSCP) analysis, heteroduplex analysis, oligonucleotide ligation, PCR-RFLP, allele-specific amplification (ASA), single-molecule dilution (SMD), coupled amplification and sequencing (CAS), Restriction enzyme analysis, restriction fragment length polymorphism (RFLP), ligation based assays, single base extension (or minisequencing), MALDI-TOF, and homogenous assays.

[0214] The kits can optionally include instructional materials containing directions (i.e., protocols) providing for the use of a compounds and composition in the treatment of AD. While the instructional materials typically comprise written or printed materials they are not limited to such. Any medium capable of storing such instructions and communicating them to an end user is contemplated by this invention. Such media include, but are not limited to electronic storage media (e.g., magnetic discs, tapes, cartridges, chips), optical media (e.g., CD ROM), and the like. Such media may include addresses to internet sites that provide such instructional materials.

[0215] Kits for determining if a subject is at increased risk of developing Alzheimer's disease will include at least one reagent specific for detecting for the presence or absence of the AD risk associated SNPs described herein or antibodies specific for detecting the gene expression products (e.g., PLXNA4) associated with AD risk associated SNPs, and instructions for observing that the subject is at increased risk of developing Alzheimer's disease if the presence of at least one of the SNPs described herein is detected. The kit may optionally include a nucleic acid for detection of the gene of interest.

[0216] Diagnostic kits for carrying out antibody assays can be produced in a number of ways. In one embodiment, the diagnostic kit comprises (a) an antibody which binds PLXNA4 conjugated to a solid support and (b) a second antibody which binds PLXNA4 conjugated to a detectable group. The reagents may also include ancillary agents such as buffering agents and protein stabilizing agents, e.g., polysaccharides and the like. The diagnostic kit may further include, where necessary, other members of the signal-producing system of which system the detectable group is a member (e.g., enzyme substrates), agents for reducing background interference in a test, control reagents, apparatus for conducting a test, and the like. A second embodiment of a test kit comprises (a) an antibody as above, and (b) a specific binding partner for the antibody conjugated to a detectable group. Ancillary agents as described above can likewise be included. The test kit may be packaged in any suitable manner, typically with all elements in a single container along with a sheet of printed instructions for carrying out the test. In other embodiments, the diagnostic kits can comprise primers or probes for detection of mRNA level of PLXNA4 isoform TS1 and/or TS3.

[0217] Exemplary embodiments of the various aspects disclosed herein can be described by one or more of the following numbered paragraphs:
[0218] 1. A method for inhibiting progression of Alzheimer's disease, the method comprising administering to a subject having or at risk for Alzheimer's disease a therapeutically effective amount of a TS1 PLXNA4 inhibitory agent.
[0219] 2. A method for inhibiting progression of Alzheimer's disease in a subject in need thereof, the method comprising administering to a subject determined to have one or more of AD risk associated single nucleotide polymorphism (SNP) selected from: (i) SNP1 genotype A/A or A/C (or T/T or T/G in the complement) of SEQ ID NO: 1, wherein SNP1 is identified by rs277472 on SEQ ID NO: 1, wherein SEQ ID NO. 1 is a portion of genomic nucleic acid sequence of plexin A4 (PLXNA4); (ii) SNP2 genotype T/T or T/C (or A/A or A/C in the complement) of SEQ ID NO: 1, wherein SNP2 is position 132,006,366 of SEQ ID NO: 1 identified by rs10236235, wherein SEQ ID NO. 1 is a portion of genomic nucleic acid sequence of PLXNA4; (iii) SNP3 genotype C/C or C/A (or G/G or G/T in the complement) of SEQ ID NO: 1, wherein SNP3 identified by rs11761937 on SEQ ID NO: 1, wherein the SEQ ID NO: 1 is a portion of genomic nucleic acid sequence of PLXNA4; and (iv) any combinations thereof, a therapeutically effective amount of a TS1 PLXNA4 inhibitory agent.
[0220] 3. A method for inhibiting or reducing neurofibrillary tangles in the brain, the method comprising administering to a subject having or at risk for having neurofibrillary tangles in the brain a therapeutically effective amount of a TS1 PLXNA4 inhibitory agent.
[0221] 4. A method for inhibiting or reducing neurofibrillary tangles in the brain of a subject in need thereof, the method comprising administering to a subject determined to have one or more of AD risk associated single nucleotide polymorphism (SNP) selected from: (i) SNP1 genotype A/A or A/C (or T/T or T/G in the complement) of SEQ ID NO: 1, wherein SNP1 is identified by rs277472 on SEQ ID NO: 1, wherein SEQ ID NO. 1 is a portion of genomic nucleic acid sequence of plexin A4 (PLXNA4); (ii) SNP2 genotype T/T or T/C (or A/A or A/C in the complement) of SEQ ID NO: 1, wherein SNP2 is position 132,006,366 of SEQ ID NO: 1 identified by rs10236235, wherein SEQ ID NO. 1 is a portion of genomic nucleic acid sequence of PLXNA4; (iii) SNP3 genotype C/C or C/A (or G/G or G/T in the complement) of SEQ ID NO: 1, wherein SNP3 identified by rs11761937 on SEQ ID NO: 1, wherein the SEQ ID NO. 1 is a portion of genomic nucleic acid sequence of PLXNA4; and (iv) any combinations thereof, a therapeutically effective amount of a TS1 PLXNA4 inhibitory agent.
[0222] 5. A method for inhibiting or reducing tau phosphorylation in the brain, the method comprising administering to a subject in need thereof a therapeutically effective amount of a TS1 PLXNA4 inhibitory agent.
[0223] 6. A method for inhibiting or reducing tau phosphorylation in the brain of a subject in need thereof, the method comprising administering to a subject determined to have one or more of AD risk associated single nucleotide polymorphism (SNP) selected from: (i) SNP1 genotype A/A or A/C (or T/T or T/G in the complement) of SEQ ID NO: 1, wherein SNP1 is identified by rs277472 on SEQ ID NO: 1, wherein SEQ ID NO. 1 is a portion of genomic nucleic acid sequence of plexin A4 (PLXNA4); (ii) SNP2 genotype T/T or T/C (or A/A or A/C in the complement) of SEQ ID NO: 1, wherein SNP2 is position 132,006,366 of SEQ ID NO: 1 identified by rs10236235, wherein SEQ ID NO. 1 is a portion of genomic nucleic acid sequence of PLXNA4; (iii) SNP3 genotype C/C or C/A (or G/G or G/T in the complement) of SEQ ID NO: 1, wherein SNP3 identified by rs11761937 on SEQ ID NO: 1, wherein the SEQ ID NO. 1 is a portion of genomic nucleic acid sequence of PLXNA4; and (iv) any combinations thereof, a therapeutically effective amount of a TS1 PLXNA4 inhibitory agent.
[0224] 7. A method for treating a subject having or at risk for Alzheimer's disease, comprising administering a therapeutically effective amount of a TS1 PLXNA4 inhibitory agent to a subject in need thereof
[0225] 8. A method for treating a subject having or at risk for Alzheimer's disease, the method comprising administering to a subject determined to have one or more of AD risk associated single nucleotide polymorphism (SNP) selected from: (i) SNP1 genotype A/A or A/C (or T/T or T/G in the complement) of SEQ ID NO: 1, wherein SNP1 is identified by rs277472 on SEQ ID NO: 1, wherein SEQ ID NO. 1 is a portion of genomic nucleic acid sequence of plexin A4 (PLXNA4); (ii) SNP2 genotype T/T or T/C (or A/A or A/C in the complement) of SEQ ID NO: 1, wherein SNP2 is position 132,006,366 of SEQ ID NO: 1 identified by rs10236235, wherein SEQ ID NO. 1 is a portion of genomic nucleic acid sequence of PLXNA4; (iii) SNP3 genotype C/C or C/A (or G/G or G/T in the complement) of SEQ ID NO: 1, wherein SNP3 identified by rs11761937 on SEQ ID NO: 1, wherein the SEQ ID NO. 1 is a portion of genomic nucleic acid sequence of PLXNA4; and (iv) any combinations thereof, a therapeutically effective amount of a TS1 PLXNA4 inhibitory agent.
[0226] 9. The method of any of paragraphs 1-8, wherein the subject is determined to have two or more AD risk associated single nucleotide polymorphism (SNP) selected from: (i) SNP1 genotype A/A or A/C (or T/T or T/G in the complement) of SEQ ID NO: 1, wherein SNP1 is identified by rs277472 on SEQ ID NO: 1, wherein SEQ ID NO. 1 is a portion of genomic nucleic acid sequence of plexin A4 (PLXNA4); (ii) SNP2 genotype T/T or T/C (or A/A or A/C in the complement) of SEQ ID NO: 1, wherein SNP2 is position 132,006,366 of SEQ ID NO: 1 identified by rs10236235, wherein SEQ ID NO. 1 is a portion of genomic nucleic acid sequence of PLXNA4; (iii) SNP3 genotype C/C or C/A (or G/G or G/T in the complement) of SEQ ID NO: 1, wherein SNP3 identified by rs11761937 on SEQ ID NO: 1, wherein the SEQ ID NO. 1 is a portion of genomic nucleic acid sequence of PLXNA4; and (iv) any combinations thereof
[0227] 10. The method of any of paragraphs 1-9, wherein the subject is determined to have three AD risk associated single nucleotide polymorphism (SNP) selected from: (i) SNP1 genotype A/A or A/C (or T/T or T/G in the complement) of SEQ ID NO: 1, wherein SNP1 is identified by rs277472 on SEQ ID NO: 1, wherein SEQ ID NO. 1 is a portion of genomic nucleic acid sequence of plexin A4 (PLXNA4); (ii) SNP2 genotype T/T or T/C (or A/A or A/C in the complement) of SEQ ID NO: 1, wherein SNP2 is position 132,006,366 of SEQ ID NO: 1 identified by rs10236235, wherein SEQ ID NO. 1 is a portion of genomic nucleic acid sequence of PLXNA4; and (iii) SNP3 genotype C/C or C/A (or G/G or G/T in the complement) of SEQ ID NO: 1, wherein SNP3 identified by rs11761937 on SEQ ID NO: 1, wherein the SEQ ID NO. 1 is a portion of genomic nucleic acid sequence of PLXNA4.
[0228] 11. The method any one of paragraphs 1-10, wherein the TS1 PLXNA4 inhibitory agent is selected from the group consisting of small molecules, nucleic acids, nucleic acid analogues, peptides, proteins, antibodies, antigen binding fragments of antibodies, and any combinations thereof
[0229] 12. The method of any of paragraphs 1-11, wherein the TS1 PLXNA4 inhibitory agent is an oligonucleotide.
[0230] 13. The method of any of paragraphs 1-12, wherein the TS1 PLXNA4 inhibitory agent is an anti-miR, antagomir, antisense oligonucleotide, ribozyme, aptamer, siRNA, shRNA, or RNAi agent.
[0231] 14. The method of any one of paragraphs 1-13, wherein the TS1 PLXNA4 inhibitory agent does not bind or inhibit TS2 PLXNA4 or TS3 PLXNA4.
[0232] 15. The method of any of paragraphs 1-14, further comprising a step of diagnosing the subject with AD or risk of AD prior to said administering.
[0233] 16. The method of any of paragraphs 1-15, further comprising assaying a biological sample from the subject before onset of said administering, wherein said assaying comprising measuring the absence of presence of a SNP selected from the group consisting of: (i) SNP1 genotype A/A or A/C (or T/T or T/G in the complement) of SEQ ID NO: 1, wherein SNP1 is identified by rs277472 on SEQ ID NO: 1, wherein SEQ ID NO. 1 is a portion of genomic nucleic acid sequence of plexin A4 (PLXNA4); (ii) SNP2 genotype T/T or T/C (or A/A or A/C in the complement) of SEQ ID NO: 1, wherein SNP2 is position 132,006,366 of SEQ ID NO: 1 identified by rs10236235, wherein SEQ ID NO. 1 is a portion of genomic nucleic acid sequence of PLXNA4; (iii) SNP3 genotype C/C or C/A (or G/G or G/T in the complement) of SEQ ID NO: 1, wherein SNP3 identified by rs11761937 on SEQ ID NO: 1, wherein the SEQ ID NO. 1 is a portion of genomic nucleic acid sequence of PLXNA4; and (iv) any combinations thereof, wherein presence of one or more of SNP1-SNP3 is indicative of proceeding with said administering regimen.
[0234] 17. The method of paragraph 16, wherein said assaying comprises: subjecting the biological sample from a subject to at least one genotyping assay that determines the genotypes of at least one (e.g., one, two, or three) loci, wherein said loci are selected from: (i) SNP1, wherein SNP1 is identified by rs277472 on SEQ ID NO: 1, wherein SEQ ID NO. 1 is a portion of genomic nucleic acid sequence of plexin A4 (PLXNA4); (ii) SNP2, wherein SNP2 is position 132,006,366 of SEQ ID NO: 1 identified by rs10236235, wherein SEQ ID NO. 1 is a portion of genomic nucleic acid sequence of PLXNA4; (iii) SNP3, wherein SNP3 identified by rs11761937 on SEQ ID NO: 1, wherein the SEQ ID NO. 1 is a portion of genomic nucleic acid sequence of PLXNA4; and (iv) any combinations thereof
[0235] 18. The method of paragraph 16 or 17, wherein said assaying comprises:
   [0236] a. contacting the biological sample with an allele specific detectable oligonucleotide specific for at least one of the following SNPs: (i) SNP1 genotype A/A or A/C (or T/T or T/G in the complement) of SEQ ID NO: 1, (ii) SNP2 genotype T/T or T/C (or A/A or A/C in the complement) of SEQ ID NO: 1, (iii) SNP3 genotype C/C or C/A (or G/G or G/T in the complement) of SEQ ID NO: 1, and (iv) any combinations thereof;
   [0237] b. washing the sample to remove unbound oligonucleotide;
   [0238] c. measuring the intensity of the signal from the bound, detectable bound detectable oligonucleotide;
   [0239] d. comparing the measured intensity of the signal with a reference value, wherein an increased measured intensity relative to the reference value is indicative of presence of at least one of SNP1-SNP3.
[0240] 19. The method of any of paragraphs 1-18, further comprising assaying a biological sample from the subject before onset of said administering, wherein said assaying comprising measuring the expression or level of TS1 or TS3 PLXNA4, wherein an increased level of expression or amount of TS1 or TS3 PLXNA4, is indicative of proceeding with said administering regimen.
[0241] 20. The method of paragraph 19, where said assaying comprises:
   [0242] a. contacting a biological sample obtained from a subject with a detectable antibody specific for TS1 or TS3 PLXNA4 or detectable nucleic acid for TS1 or TS3 PLXNA4;
   [0243] b. washing the sample to remove unbound antibody or unbound nucleic acid;
   [0244] c. measuring the intensity of the signal from the bound, detectable antibody or bound detectable nucleic acid;
   [0245] d. comparing the measured intensity of the signal with a reference value and if the measured intensity is increased relative to the reference value; and
   [0246] e. identifying the subject as having an increased probability of having AD.
[0247] 21. An assay comprising:
   [0248] a. subjecting a test sample from a subject to at least one genotyping assay that determines the genotypes of at least one (e.g., one, two, or three) loci, wherein said loci are selected from: (i) SNP1, wherein SNP1 is identified by rs277472 on SEQ ID NO: 1, wherein SEQ ID NO. 1 is a portion of genomic nucleic acid sequence of plexin A4 (PLXNA4); (ii) SNP2, wherein SNP2 is position 132,006,366 of SEQ ID NO: 1 identified by rs10236235, wherein SEQ ID NO. 1 is a portion of genomic nucleic acid sequence of PLXNA4; (iii) SNP3, wherein SNP3 identified by rs11761937 on SEQ ID NO: 1, wherein the SEQ ID NO. 1 is a portion of genomic nucleic acid sequence of PLXNA4; and (iv) any combinations thereof; and
   [0249] b. identifying the subject as having an increased probability of having AD when at least one of the following combinations of SNPs is determined to be present: (i) SNP1 genotype A/A or A/C (or T/T or T/G in the complement) of SEQ ID NO: 1, (ii) SNP2 genotype T/T or T/C (or A/A or A/C in the complement) of SEQ ID NO: 1, (iii) SNP3 genotype C/C or C/A (or G/G or G/T in the complement) of SEQ ID NO: 1, and (iv) any combinations thereof
[0250] 22. The assay of paragraph 21, wherein said loci of step (a) are further selected from: (i) SNP4, wherein SNP4 is identified by rs1593222 of SEQ ID NO: 1, wherein the SEQ ID NO. 1 is a portion of genomic nucleic acid sequence of PLXNA4; (ii) SNP5, wherein SNP5 is identified by rs6959579 of SEQ ID NO: 1, wherein the SEQ ID NO. 1 is a portion of genomic nucleic acid sequence of PLXNA4; (iii) SNP6, wherein SNP6 is identified by rs17166339 of SEQ ID NO: 1, wherein the SEQ ID NO. 1 is a portion of genomic nucleic acid sequence of PLXNA4.
[0251] 23. An assay comprising:
   [0252] a. transforming at least one nucleic acid polymorphism in a locus in a biological sample from the subject into at least one detectable target, wherein the locus is selected from: (i) SNP1, wherein SNP1 is identified by rs277472 on SEQ ID NO: 1, wherein SEQ ID NO. 1 is a portion of genomic nucleic acid sequence of plexin A4 (PLXNA4); (ii) SNP2, wherein SNP2 is position 132,006,366 of SEQ ID NO: 1 identified by rs10236235, wherein SEQ ID NO. 1 is a portion of genomic nucleic acid sequence of PLXNA4; (iii) SNP3, wherein SNP3 identified by rs11761937 on SEQ ID NO: 1, wherein the SEQ ID NO. 1 is a portion of genomic nucleic acid sequence of PLXNA4; and (iv) any combinations thereof and
   [0253] b. detecting presence or absence of at least one AD risk associated SNP from the at least one detectable target, wherein the at least one AD risk associated SNP is selected from: (i) SNP1 genotype A/A or A/C (or T/T or T/G in the complement) of SEQ ID NO: 1, (ii) SNP2 genotype T/T or T/C (or A/A or A/C in the complement) of SEQ ID NO: 1, (iii) SNP3 genotype C/C or C/A (or G/G or G/T in the complement) of SEQ ID NO: 1, and (iv) any combinations thereof and
   [0254] c. identifying the subject as having an increased probability of having AD if presence of at least one AD risk associated SNP is detected.
[0255] 24. An assay comprising:
   [0256] a. contacting a biological sample obtained from a subject with an allele specific detectable oligonucleotide specific for at least one of the following SNPs: (i) SNP1 genotype A/A or A/C (or T/T or T/G in the complement) of SEQ ID NO: 1, (ii) SNP2 genotype T/T or T/C (or A/A or A/C in the complement) of SEQ ID NO: 1, (iii) SNP3 genotype C/C or C/A (or G/G or G/T in the complement) of SEQ ID NO: 1, and (iv) any combinations thereof;
   [0257] b. washing the sample to remove unbound oligonucleotide;
   [0258] c. measuring the intensity of the signal from the bound, detectable bound detectable oligonucleotide;
   [0259] d. comparing the measured intensity of the signal with a reference value and if the measured intensity is increased relative to the reference value; and
   [0260] e. identifying the subject as having an increased probability of having AD.
[0261] 25. An assay for identifying a subject having or at risk for Alzheimer's disease comprising:
   [0262] a. subjecting a test sample from a subject to at least one genotyping assay that determines the genotypes of at least one (e.g., one, two, or three) loci, wherein said loci are selected from: (i) SNP1, wherein SNP1 is identified by rs277472 on SEQ ID NO: 1, wherein SEQ ID NO. 1 is a portion of genomic nucleic acid sequence of plexin A4 (PLXNA4); (ii) SNP2, wherein SNP2 is position 132,006,366 of SEQ ID NO: 1 identified by rs10236235, wherein SEQ ID NO. 1 is a portion of genomic nucleic acid sequence of PLXNA4; (iii) SNP3, wherein SNP3 identified by rs11761937 on SEQ ID NO: 1, wherein the SEQ ID NO. 1 is a portion of genomic nucleic acid sequence of PLXNA4; and (iv) any combinations thereof; and
   [0263] b. identifying the subject as having an increased probability of having AD when at least one of the following combinations of SNPs is determined to be present: (i) SNP1 genotype A/A or A/C (or T/T or T/G in the complement) of SEQ ID NO: 1, (ii) SNP2 genotype T/T or T/C (or A/A or A/C in the complement) of SEQ ID NO: 1, (iii) SNP3 genotype C/C or C/A (or G/G or G/T in the complement) of SEQ ID NO: 1, and (iv) any combinations thereof
[0264] 26. An assay for identifying a subject having or at risk for Alzheimer's disease comprising:

[0265] a. transforming at least one nucleic acid polymorphism in a locus in a biological sample from the subject into at least one detectable target, wherein the locus is selected from: (i) SNP1, wherein SNP1 is identified by rs277472 on SEQ ID NO: 1, wherein SEQ ID NO. 1 is a portion of genomic nucleic acid sequence of plexin A4 (PLXNA4); (ii) SNP2, wherein SNP2 is position 132,006,366 of SEQ ID NO: 1 identified by rs10236235, wherein SEQ ID NO. 1 is a portion of genomic nucleic acid sequence of PLXNA4; (iii) SNP3, wherein SNP3 identified by rs11761937 on SEQ ID NO: 1, wherein the SEQ ID NO. 1 is a portion of genomic nucleic acid sequence of PLXNA4; and (iv) any combinations thereof; and
[0266] b. detecting presence or absence of at least one AD risk associated SNP from the at least one detectable target, wherein the at least one AD risk associated SNP is selected from: (i) SNP1 genotype A/A or A/C (or T/T or T/G in the complement) of SEQ ID NO: 1, (ii) SNP2 genotype T/T or T/C (or A/A or A/C in the complement) of SEQ ID NO: 1, (iii) SNP3 genotype C/C or C/A (or G/G or G/T in the complement) of SEQ ID NO: 1, and (iv) any combinations thereof; and
[0267] c. identifying the subject as having an increased probability of having AD when at least one AD risk associated SNP is detected in step (b).
[0268] 27. An assay for identifying a subject having or at risk for Alzheimer's disease comprising:
   [0269] a. contacting a biological sample obtained from a subject with an allele specific detectable oligonucleotide specific for at least one of the following SNPs: (i) SNP1 genotype A/A or A/C (or T/T or T/G in the complement) of SEQ ID NO: 1, (ii) SNP2 genotype T/T or T/C (or A/A or A/C in the complement) of SEQ ID NO: 1, (iii) SNP3 genotype C/C or C/A (or G/G or G/T in the complement) of SEQ ID NO: 1, and (iv) any combinations thereof;
   [0270] b. washing the sample to remove unbound oligonucleotide;
   [0271] c. measuring the intensity of the signal from the bound, detectable bound detectable oligonucleotide;
   [0272] d. comparing the measured intensity of the signal with a reference value and if the measured intensity is increased relative to the reference value; and
   [0273] e. identifying the subject as having an increased probability of having AD.
[0274] 28. An assay for determining if a subject is in need of treatment or prevention for Alzheimer's disease, comprising:
   [0275] a. subjecting a test sample from a subject to at least one genotyping assay that determines the genotypes of at least one (e.g., one, two, or three) loci, wherein said loci are selected from: (i) SNP1, wherein SNP1 is identified by rs277472 on SEQ ID NO: 1, wherein SEQ ID NO. 1 is a portion of genomic nucleic acid sequence of plexin A4 (PLXNA4); (ii) SNP2, wherein SNP2 is position 132,006,366 of SEQ ID NO: 1 identified by rs10236235, wherein SEQ ID NO. 1 is a portion of genomic nucleic acid sequence of PLXNA4; (iii) SNP3, wherein SNP3 identified by rs11761937 on SEQ ID NO: 1, wherein the SEQ ID NO. 1 is a portion of genomic nucleic acid sequence of PLXNA4; and (iv) any combinations thereof and
   [0276] b. identifying or selecting the subject for treatment or prevention for AD when at least one of the following combinations of SNPs is determined to be present: (i) SNP1 genotype A/A or A/C (or T/T or T/G in the complement) of SEQ ID NO: 1, (ii) SNP2 genotype T/T or T/C (or A/A or A/C in the complement) of SEQ ID NO: 1, (iii) SNP3 genotype C/C or C/A (or G/G or G/T in the complement) of SEQ ID NO: 1, and (iv) any combinations thereof
[0277] 29. An assay for determining if a subject is in need of treatment or prevention for Alzheimer's disease, comprising:
   [0278] a. transforming at least one nucleic acid polymorphism in a locus in a biological sample from the subject into at least one detectable target, wherein the locus is selected from: (i) SNP1, wherein SNP1 is identified by rs277472 on SEQ ID NO: 1, wherein SEQ ID NO. 1 is a portion of genomic nucleic acid sequence of plexin A4 (PLXNA4); (ii) SNP2, wherein SNP2 is position 132,006,366 of SEQ ID NO: 1 identified by rs10236235, wherein SEQ ID NO. 1 is a portion of genomic nucleic acid sequence of PLXNA4; (iii) SNP3, wherein SNP3 identified by rs11761937 on SEQ ID NO: 1, wherein the SEQ ID NO. 1 is a portion of genomic nucleic acid sequence of PLXNA4; and (iv) any combinations thereof and
   [0279] b. detecting presence or absence of at least one AD risk associated SNP from the at least one detectable target, wherein the at least one AD risk associated SNP is selected from: (i) SNP1 genotype A/A or A/C (or T/T or T/G in the complement) of SEQ ID NO: 1, (ii) SNP2 genotype T/T or T/C (or A/A or A/C in the complement) of SEQ ID NO: 1, (iii) SNP3 genotype C/C or C/A (or G/G or G/T in the complement) of SEQ ID NO: 1, and (iv) any combinations thereof; and
   [0280] c. identifying or selecting the subject for treatment or prevention for AD when at least one AD risk associated SNP is detected in step (b).
[0281] 30. An assay for determining if a subject is in need of treatment or prevention for Alzheimer's disease, comprising:
   [0282] a. contacting a biological sample obtained from a subject with an allele specific detectable oligonucleotide specific for at least one of the following SNPs: (i) SNP1 genotype A/A or A/C (or T/T or T/G in the complement) of SEQ ID NO: 1, (ii) SNP2 genotype T/T or T/C (or A/A or A/C in the complement) of SEQ ID NO: 1, (iii) SNP3 genotype C/C or C/A (or G/G or G/T in the complement) of SEQ ID NO: 1, and (iv) any combinations thereof;
   [0283] b. washing the sample to remove unbound oligonucleotide;
   [0284] c. measuring the intensity of the signal from the bound, detectable bound detectable oligonucleotide;
   [0285] d. comparing the measured intensity of the signal with a reference value and if the measured intensity is increased relative to the reference value; and
   [0286] e. identifying or selecting the subject for treatment or prevention for AD when at least one SNP of step (a) is detected.
[0287] 31. An assay for selecting a subject having or at risk for Alzheimer's disease, wherein subject is susceptible to treatment with a TS1 PLXNA4 inhibitory agent, the method comprising:
   [0288] a. subjecting a test sample from a subject to at least one genotyping assay that determines the genotypes of at least one (e.g., one, two, or three) loci, wherein said loci are selected from: (i) SNP1, wherein SNP1 is identified by rs277472 on SEQ ID NO: 1, wherein SEQ ID NO. 1 is a portion of genomic nucleic acid sequence of plexin A4 (PLXNA4); (ii) SNP2, wherein SNP2 is position 132,006,366 of SEQ ID NO: 1 identified by rs10236235, wherein SEQ ID NO. 1 is a portion of genomic nucleic acid sequence of PLXNA4; (iii) SNP3, wherein SNP3 identified by rs11761937 on SEQ ID NO: 1, wherein the SEQ ID NO. 1 is a portion of genomic nucleic acid sequence of PLXNA4; and (iv) any combinations thereof; and
   [0289] b. identifying Alzheimer's disease in the subject as susceptible for treatment with a TS1 PLXNA4 inhibitory agent when at least one of the following combinations of SNPs is determined to be present: (i) SNP1 genotype A/A or A/C (or T/T or T/G in the complement) of SEQ ID NO: 1, (ii) SNP2 genotype T/T or T/C (or A/A or A/C in the complement) of SEQ ID NO: 1, (iii) SNP3 genotype C/C or C/A (or G/G or G/T in the complement) of SEQ ID NO: 1, and (iv) any combinations thereof.
[0290] 32. An assay for selecting a subject having or at risk for Alzheimer's disease, wherein subject is susceptible to treatment with a TS1 PLXNA4 inhibitory agent, the method comprising:
   [0291] a. transforming at least one nucleic acid polymorphism in a locus in a biological sample from the subject into at least one detectable target, wherein the locus is selected from: (i) SNP1, wherein SNP1 is identified by rs277472 on SEQ ID NO: 1, wherein SEQ ID NO. 1 is a portion of genomic nucleic acid sequence of plexin A4 (PLXNA4); (ii) SNP2, wherein SNP2 is position 132,006,366 of SEQ ID NO: 1 identified by rs10236235, wherein SEQ ID NO. 1 is a portion of genomic nucleic acid sequence of PLXNA4; (iii) SNP3, wherein SNP3 identified by rs11761937 on SEQ ID NO: 1, wherein the SEQ ID NO. 1 is a portion of genomic nucleic acid sequence of PLXNA4; and (iv) any combinations thereof; and
   [0292] b. detecting presence or absence of at least one AD risk associated SNP from the at least one detectable target, wherein the at least one AD risk associated SNP is selected from: (i) SNP1 genotype A/A or A/C (or T/T or T/G in the complement) of SEQ ID NO: 1, (ii) SNP2 genotype T/T or T/C (or A/A or A/C in the complement) of SEQ ID NO: 1, (iii) SNP3 genotype C/C or C/A (or G/G or G/T in the complement) of SEQ ID NO: 1, and (iv) any combinations thereof; and
   [0293] c. identifying Alzheimer's disease in the subject as susceptible for treatment with a TS1 PLXNA4 inhibitory agent when at least one AD risk associated SNP is detected in step (b).
[0294] 33. An assay for selecting a subject having or at risk for Alzheimer's disease, wherein subject is susceptible to treatment with a TS1 PLXNA4 inhibitory agent, the method comprising:
   [0295] a. contacting a biological sample obtained from a subject with an allele specific detectable oligonucleotide specific for at least one of the following SNPs: (i) SNP1 genotype A/A or A/C (or T/T or T/G in the complement) of SEQ ID NO: 1, (ii) SNP2 genotype T/T or T/C (or A/A or A/C in the complement) of SEQ ID NO: 1, (iii) SNP3 genotype C/C or C/A (or G/G or G/T in the complement) of SEQ ID NO: 1, and (iv) any combinations thereof;
   [0296] b. washing the sample to remove unbound oligonucleotide;
   [0297] c. measuring the intensity of the signal from the bound, detectable bound detectable oligonucleotide;
   [0298] d. comparing the measured intensity of the signal with a reference value and if the measured intensity is increased relative to the reference value; and
   [0299] e. identifying Alzheimer's disease in the subject as susceptible for treatment with a TS1 PLXNA4 inhibitory agent when at least one SNP of step (a) is detected.
[0300] 34. An assay comprising:
   [0301] a. measuring or quantifying expression level or amount of TS1 or TS3 PLXNA4 in a biological sample obtained from a subject; and
   [0302] b. comparing the measured or quantified expression level or amount of TS1 or TS3 PLXNA4 with a reference value, and if the amount of expression level or amount of TS1 or TS3 PLXNA4 is increased relative to the reference value,
   [0303] c. identifying the subject as having an increased probability of having AD.
[0304] 35. An assay comprising:
   [0305] a. transforming the gene expression product of TS1 or TS3 PLXNA4 transcript into a detectable target;
   [0306] b. measuring the amount of the detectable target;
   [0307] c. comparing the amount of the detectable target to a reference; and if the amount of the detectable target is higher than a reference level; and
   [0308] d. identifying the subject as having an increased probability of having AD
[0309] 36. An assay comprising:
   [0310] a. contacting a biological sample obtained from a subject with a detectable antibody specific for TS1 or TS3 PLXNA4 or detectable nucleic acid for TS1 or TS3 PLXNA4;
   [0311] b. washing the sample to remove unbound antibody or unbound nucleic acid;
   [0312] c. measuring the intensity of the signal from the bound, detectable antibody or bound detectable nucleic acid;
   [0313] d. comparing the measured intensity of the signal with a reference value and if the measured intensity is increased relative to the reference value; and
   [0314] e. identifying the subject as having an increased probability of having AD.
[0315] 37. An assay for identifying a subject having or at risk for Alzheimer's disease comprising:
   [0316] a. measuring or quantifying the level of expression or amount of TS1 or TS3 TSPLXNA4 transcript in a biological sample obtained from a subject; and
   [0317] b. identifying the subject as having or at risk for Alzheimer's disease if the amount of TS1 and/or TS3 PLXNA4 transcript is increased relative to a reference value.
[0318] 38. An assay for determining an increased risk of a subject for developing Alzheimer's disease comprising
   [0319] a. transforming the gene expression product of TS1 or TS3 PLXNA4 transcript into a detectable target;
   [0320] b. measuring the amount of the detectable target;
   [0321] c. comparing the amount of the detectable target to a reference; wherein if the amount of the detectable target is higher than a reference level, the subject is at increased risk for developing AD.
[0322] 39. An assay for determining an increased risk of a subject for developing Alzheimer's disease comprising:
   [0323] a. contacting a biological sample obtained from a subject with a detectable antibody specific for TS1 or TS3 PLXNA4 or detectable nucleic acid for TS1 or TS3 PLXNA4;
   [0324] b. washing the sample to remove unbound antibody or unbound nucleic acid;
   [0325] c. measuring the intensity of the signal from the bound, detectable antibody or bound detectable nucleic acid;
   [0326] d. comparing the measured intensity of the signal with a reference value and if the measured intensity is increased relative to the reference value; and
   [0327] e. identifying the subject as having an increased probability of having AD.
[0328] 40. An assay for selecting a subject having or at risk for Alzheimer's disease, wherein subject is susceptible to treatment with a TS1 PLXNA4 inhibitory agent, the method comprising:
   [0329] a. measuring or quantifying the level of expression or amount of TS1 or TS3 TSPLXNA4 transcript in a biological sample obtained from a subject; and
   [0330] b. identifying Alzheimer's disease in the subject as susceptible for treatment with a TS1 PLXNA4 inhibitory agent when the amount of TS1 and/or TS3 PLXNA4 transcript is increased relative to a reference value.
[0331] 41. An assay for selecting a subject having or at risk for Alzheimer's disease, wherein subject is susceptible to treatment with a TS1 PLXNA4 inhibitory agent, the method comprising:
   [0332] a. transforming the gene expression product of TS1 or TS3 PLXNA4 transcript into a detectable target;
   [0333] b. measuring the amount of the detectable target;
   [0334] c. comparing the amount of the detectable target to a reference; and
   [0335] d. identifying Alzheimer's disease in the subject as susceptible for treatment with a TS1 PLXNA4 inhibitory agent when the amount of the detectable target is higher than a reference level.
[0336] 42. An assay for selecting a subject having or at risk for Alzheimer's disease, wherein subject is susceptible to treatment with a TS1 PLXNA4 inhibitory agent, the method comprising:
   [0337] a. contacting a biological sample obtained from a subject with a detectable antibody specific for TS1 or TS3 PLXNA4 or detectable nucleic acid for TS1 or TS3 PLXNA4;
   [0338] b. washing the sample to remove unbound antibody or unbound nucleic acid;
   [0339] c. measuring the intensity of the signal from the bound, detectable antibody or bound detectable nucleic acid;
   [0340] d. comparing the measured intensity of the signal with a reference value; and
   [0341] e. identifying Alzheimer's disease in the subject as susceptible for treatment with a TS1 PLXNA4 inhibitory agent when measured intensity of the signal from the bound, detectable antibody or bound, detectable nucleic acid is higher than a reference level.
[0342] 43. An assay for identifying a subject having or at risk for Alzheimer's disease comprising:

[0343] a. measuring or quantifying the level of expression or amount of TS1 or TS3 PLXNA4 transcript in a first biological sample obtained from a subject; and

[0344] b. measuring or quantifying the level of expression level or amount of TS1 or TS3 PLXNA4 transcript in a second biological sample obtained from a subject; and
[0345] c. identifying the subject as having or at risk for Alzheimer's disease if the amount of Ts1 or TS3 PLXNA4 transcript is increased in the second biological sample relative to the first biological sample by at least 20%.
[0346] 44. An assay for identifying a subject having or at risk for Alzheimer's disease comprising:
   [0347] a. measuring or quantifying the amount of TS3 PLXNA4 transcript and TS1 PLXNA4 transcript in a biological sample obtained from a subject; and
   [0348] b. identifying the subject as having or at risk for Alzheimer's disease if the amount of TS3 PLXNA4 transcript, TS1 PLXNA4 transcript, or both are increased relative to a reference TS3 PLXNA4 transcript value.
[0349] 45. The assay of any of paragraphs 21-44, further comprising selecting the subject for a treatment regimen, if the subject is identified as having or at risk for Alzheimer's disease.
[0350] 46. The assay of any of paragraphs 21-45, further comprising selecting the subject for administering a TS1 PLXNA4 inhibitory agent, if the subject is identified as having or at risk for Alzheimer's disease.
[0351] 47. The assay of any one of paragraphs 21-46, wherein the biological sample is a serum sample.
[0352] 48. A computer implemented system for determining presence or absence of alleles associated with an increased risk of a subject for developing late onset Alzheimer's disease (AD), the system comprising:
   [0353] a. a determination module configured to identify and detect at least one single nucleotide polymorphism (SNP) in a biological sample of a subject, wherein the SNP is selected from: (i) SNP1, wherein SNP1 is identified by rs277472 on SEQ ID NO: 1, wherein SEQ ID NO. 1 is a portion of genomic nucleic acid sequence of plexin A4 (PLXNA4); (ii) SNP2, wherein SNP2 is position 132,006,366 of SEQ ID NO: 1 identified by rs10236235, wherein SEQ ID NO. 1 is a portion of genomic nucleic acid sequence of PLXNA4; (iii) SNP3, wherein SNP3 identified by rs11761937 on SEQ ID NO: 1, wherein the SEQ ID NO. 1 is a portion of genomic nucleic acid sequence of PLXNA4; and (iv) any combinations thereof;
   [0354] b. a storage module configured to store output data from the determination module;
   [0355] c. a computing module adapted to identify from the output data at least one of AD risk associated SNP is present in the output data stored on the storage module, wherein the AD risk associated SNP is selected from: (i) SNP1 genotype A/A or A/C (or T/T or T/G in the complement) of SEQ ID NO: 1, (ii) SNP2 genotype T/T or T/C (or A/A or A/C in the complement) of SEQ ID NO: 1, (iii) SNP3 genotype C/C or C/A (or G/G or G/T in the complement) of SEQ ID NO: 1, and (iv) any combinations thereof; and
   [0356] d. a display module for displaying if any of the AD risk associated SNP was identified or not, and/or displaying the detected alleles.
[0357] 49. A computer readable medium having computer readable instructions recorded thereon to define software modules for implementing a method on a computer, said computer readable storage medium comprising:
   [0358] a. instructions for comparing the data stored on a storage device with reference data to provide a comparison result, wherein the comparison identifies the presence or absence of at least one of the following conditions: (i) SNP1 genotype A/A or A/C (or T/T or T/G in the complement) of SEQ ID NO: 1, (ii) SNP2 genotype T/T or T/C (or A/A or A/C in the complement) of SEQ ID NO: 1, (iii) SNP3 genotype C/C or C/A (or G/G or G/T in the complement) of SEQ ID NO: 1, and (iv) any combinations thereof;
   [0359] b. instructions for displaying a content based in part on the data output from said determination module, wherein the content comprises a signal indicative of the presence of at least one of the conditions, and optionally the absence of one or more of the conditions

### SOME SELECTED DEFINITIONS

[0360] For convenience, certain terms employed herein, in the specification, examples and appended claims are collected here. Unless stated otherwise, or implicit from context, the following terms and phrases include the meanings provided below. Unless explicitly stated otherwise, or apparent from context, the terms and phrases below do not exclude the meaning that the term or phrase has acquired in the art to which it pertains. The definitions are provided to aid in describing particular embodiments, and are not intended to limit the claimed invention, because the scope of the invention is limited only by the claims. Unless otherwise defined, all technical and scientific terms used herein have the same meaning as commonly understood by one of ordinary skill in the art to which this invention belongs.

[0361] Other than in the operating examples, or where otherwise indicated, all numbers expressing quantities of ingredients or reaction conditions used herein should be understood as modified in all instances by the term “about.” The term “about” when used in connection with percentages may mean±1%.

[0362] The singular terms “a,” “an,” and “the” include plural referents unless context clearly indicates otherwise. Similarly, the word “or” is intended to include “and” unless the context clearly indicates otherwise. Although methods and materials similar or equivalent to those described herein can be used in the practice or testing of this disclosure, suitable methods and materials are described below. The abbreviation, “e.g.” is derived from the Latin exempli gratia, and is used herein to indicate a non-limiting example. Thus, the abbreviation “e.g.” is synonymous with the term “for example.”

[0363] As used herein, “SEQ ID NO: 1” refers to the genomic sequence of human PLXNA4 of Gene ID 91584, which can be found at bases 131808091 to 132333447 of the human chromosome 7 NCBI Reference Sequence: NC_000007.13.

[0364] As used herein, the “TS1 PLXNA4 transcript” or “TS1” refers to the full-length Plexin A4 (PLXNA4) transcript that contains 31 exons and encodes an isoform with 1,894 residues. As used herein, “TΩ PLXNA4 transcript” or “TS2” and “TS3 PLXNA4 transcript” or “TS3” refer to two alternatively spliced transcripts each of which contains three exons, thereby yielding shorter isoforms of 522 residues (TS2) and 492 residues (TS3), respectively.

[0365] The terms “treatment” and “treating” as used herein, with respect to treatment of a disease, means preventing the progression of the disease, or altering the course of the disorder (for example, but are not limited to, slowing the progression of the disorder), or reversing a symptom of the disorder or reducing one or more symptoms and/or one or more biochemical markers in a subject, preventing one or more symptoms from worsening or progressing, promoting recovery or improving prognosis.

[0366] As used herein, the term “nucleic acid” or “oligonucleotide” or “polynucleotide” refers to a polymer or an oligomer of nucleotide or nucleoside monomers consisting of nucleobases, sugars and intersugar linkages. The term “oligonucleotide” also includes polymers or oligomers comprising non-naturally occurring monomers, or portions thereof, which function similarly. Such modified or substituted oligonucleotides are often preferred over native forms because of properties such as, for example, enhanced cellular uptake and increased stability in the presence of nucleases.

[0367] As used herein, “effective treatment” includes any statistically significant improvement in one or more indicia of the disease or disorder.

[0368] As used herein, the terms “prevent,” “preventing” and “prevention” refer to the avoidance or delay in manifestation of one or more symptoms or measurable markers of a disease or disorder, e.g., Alzheimer's disease. A delay in the manifestation of a symptom or marker is a delay relative to the time at which such symptom or marker manifests in a control or untreated subject with a similar likelihood or susceptibility of developing the disease or disorder. The terms “prevent,” “preventing” and “prevention” include not only the avoidance or prevention of a symptom or marker of the disease, but also a reduced severity or degree of any one of the symptoms or markers of the disease, relative to those symptoms or markers in a control or non-treated individual with a similar likelihood or susceptibility of developing the disease or disorder, or relative to symptoms or markers likely to arise based on historical or statistical measures of populations affected by the disease or disorder. By “reduced severity” is meant at least a 10% reduction in the severity or degree of a symptom or measurable disease marker, relative to a control or reference, e.g., at least 15%, 20%, 30%, 40%, 50%, 60%, 70%, 80%, 90%, 95%, 99% or even 100% (i.e., no symptoms or measurable markers).

[0369] The oligonucleotide can be single-stranded or double-stranded. A single-stranded oligonucleotide can have double-stranded regions and a double-stranded oligonucleotide can have single-stranded regions. The oligonucleotide can have a hairpin structure or have a dumbbell structure. The oligonucleotide can be circular, e.g., wherein the 5′end of the oligonucleotide is linked to the 3′ end of the oligonucleotide. As will be appreciated by those in the art, the depiction of a single strand also defines the sequence of the complementary strand. Thus, a nucleic acid also encompasses the complementary strand of a depicted single strand. As will also be appreciated by those in the art, many variants of a nucleic acid can be used for the same purpose as a given nucleic acid. Thus, a nucleic acid also encompasses substantially identical nucleic acids and complements thereof. As will also be appreciated by those in the art, a single strand provides a probe that can hybridize to the target sequence under stringent hybridization conditions. Thus, a nucleic acid also encompasses a probe that hybridizes under stringent hybridization conditions.

[0370] The oligonucleotides described herein can comprise any oligonucleotide modification described herein and below. In some embodiments, the oligonucleotide comprises at least one modification. In some embodiments, the modification is selected from the group consisting of a sugar modification, a non-phosphodiester inter-sugar (or inter-nucleoside) linkage, nucleobase modification, and ligand conjugation.

[0371] As used herein, an oligonucleotide can be of any length. In some embodiments, oligonucleotides can range from about 6 to 100 nucleotides in length. In various related embodiments, the oligonucleotide can range in length from about 10 to about 50 nucleotides, from about 10 to about 35 nucleotides, from about 15 to about 30 nucleotides, from about 20 to about 30 nucleotides in length. In some embodiments, oligonucleotide is from about 8 to about 39 nucleotides in length. In some embodiments, the oligonucleotide is 6 to 25 nucleotides in length (e.g., 6, 7, 8, 9, 10, 11, 12, 13, 14, 15, 16, 18, 19, 20, 21, 22, 23, or 24 nucleotides in length). In some embodiments the oligonucleotide is 25-30 nucleotides. In some embodiments, the single-stranded oligonucleotide is 15 to 29 nucleotides in length. In some other embodiments, the oligonucleotide is from about 18 to about 25 nucleotides in length. In some embodiments, the oligonucleotide is about 23 nucleotides in length. In some embodiments, a single-stranded oligonucleotide is 6, 7, 8, 9, 10, 11, 12, 13, 14, 15, 16, 17, 18, or 19 nucleotides in length.

[0372] The oligonucleotide can be completely DNA, completely RNA, or comprise both RNA and DNA nucleotides. It is to be understood that when the oligonucleotide is completely DNA, RNA, or a mix of both, the oligonucleotide can comprise one or more oligonucleotide modifications described herein.

[0373] In some embodiments of the various aspect described herein, the oligonucleotides can include one or more oligonucleotide or nucleic acid modifications. Unmodified oligonucleotides can be less than optimal in some applications, e.g., unmodified oligonucleotides can be prone to degradation by e.g., cellular nucleases. However, chemical modifications to one or more of the subunits of oligonucleotide can confer improved properties, e.g., can render oligonucleotides more stable to nucleases. Typical oligonucleotide modifications can include one or more of: (i) alteration, e.g., replacement, of one or both of the non-linking phosphate oxygens and/or of one or more of the linking phosphate oxygens in the phosphodiester intersugar linkage; (ii) alteration, e.g., replacement, of a constituent of the ribose sugar, e.g., of the 2′ hydroxyl on the ribose sugar; (iii) wholesale replacement of the phosphate moiety with “dephospho” linkers; (iv) modification or replacement of a naturally occurring base with a non-natural base; (v) replacement or modification of the ribose-phosphate backbone, e.g. peptide nucleic acid (PNA); (vi) modification of the 3′ end or 5′ end of the oligonucleotide, e.g., removal, modification or replacement of a terminal phosphate group or conjugation of a moiety, e.g., conjugation of a ligand, to either the 3′ or 5′ end of oligonucleotide; and (vii) modification of the sugar, e.g., six membered rings.

[0374] The terms replacement, modification, alteration, and the like, as used in this context, do not imply any process limitation, e.g., modification does not mean that one must start with a reference or naturally occurring ribonucleic acid and modify it to produce a modified ribonucleic acid bur rather modified simply indicates a difference from a naturally occurring molecule. As described below, modifications, e.g., those described herein, can be provided as asymmetrical modifications.

[0375] A modification described herein can be the sole modification, or the sole type of modification included on multiple nucleotides, or a modification can be combined with one or more other modifications described herein. The modifications described herein can also be combined onto an oligonucleotide, e.g. different nucleotides of an oligonucleotide have different modifications described herein.

[0376] The phosphate group in the intersugar linkage can be modified by replacing one of the oxygens with a different substituent. One result of this modification to RNA phosphate intersugar linkages can be increased resistance of the oligonucleotide to nucleolytic breakdown. Examples of modified phosphate groups include phosphorothioate, phosphoroselenates, borano phosphates, borano phosphate esters, hydrogen phosphonates, phosphoroamidates, alkyl or aryl phosphonates and phosphotriesters. Some exemplary intersugar linkage modifications include phosphonate phosphorothioate, phosphorodithioate, phosphoramidate methoxyethyl phosphoramidate, formacetal, thioformacetal, diisopropylsilyl, acetamidate, carbamate, dimethylene-sulfide (—CH₂—S—CH2), diinethylene-sulfoxide (—CH₂—SO—CH₂), dimethylene-sulfone (—CH2-SO₂—CH₂), 2′-O-alkyl, and 2′-deoxy-2′-fluoro phosphorothioate.

[0377] An oligonucleotide can include modification of all or some of the sugar groups of the nucleic acid. For example, the 2′ position (H, DNA; or OH, RNA) can be modified with a number of different “oxy” or “deoxy” substituents. While not being bound by theory, enhanced stability is expected since the 2′-hydroxyl can no longer be deprotonated to form a 2′-alkoxide ion. The 2′-alkoxide can catalyze degradation by intramolecular nucleophilic attack on the linker phosphorus atom. Again, while not wishing to be bound by theory, it can be desirable to some embodiments to introduce alterations in which alkoxide formation at the 2′ position is not possible. Preferred sugar modifications are 2′-O-Me (2′-O-methyl), 2′-O-MOE (2′-O-methoxyethyl), 2′-F, 2′-O-[2-(methylamino)-2-oxoethyl] (2′-O-NMA), 2′-S-methyl, 2′-O—CH₂-(4′-C) (LNA), 2′-O—CH₂CH₂-(4′-C) (ENA), 2′-O-aminopropyl (2′-O-AP), 2′-O-dimethylaminoethyl (2′-O-DMAOE), 2′-O-dimethylaminopropyl (2′-O-DMAP), and 2′-O-dimethylaminoethyloxyethyl (2′-O-DMAEOE).

[0378] It is to be understood that when a particular nucleotide is linked through its 2′-position to the next nucleotide, the sugar modifications described herein can be placed at the 3′-position of the sugar for that particular nucleotide, e.g., the nucleotide that is linked through its 2′-position. A modification at the 3′ position can be present in the xylose configuration. The term “xylose configuration” refers to the placement of a substituent on the C3′ of ribose in the same configuration as the 3′-OH is in the xylose sugar.

[0379] Adenine, cytosine, guanine, thymine and uracil are the most common bases (or nucleobases) found in nucleic acids. These bases can be modified or replaced to provide oligonucleotides having improved properties. For example, nuclease resistant oligonucleotides can be prepared with these bases or with synthetic and natural nucleobases (e.g., inosine, xanthine, hypoxanthine, nubularine, isoguanisine, or tubercidine) and any one of the above modifications. Alternatively, substituted or modified analogs of any of the above bases and “universal bases” can be employed. When a natural base is replaced by a non-natural and/or universal base, the nucleotide is said to comprise a modified nucleobase and/or a nucleobase modification herein. Modified nucleobase and/or nucleobase modifications also include natural, non-natural and universal bases, which comprise conjugated moieties, e.g. a ligand described herein. Preferred conjugate moieties for conjugation with nucleobases include cationic amino groups which can be conjugated to the nucleobase via an appropriate alkyl, alkenyl or a linker with an amide linkage. Modified nucleobases include other synthetic and natural nucleobases such as inosine, xanthine, hypoxanthine, nubularine, isoguanisine, tubercidine, 2-(halo)adenine, 2-(alkyl)adenine, 2-(propyl)adenine, 2-(amino)adenine, 2-(aminoalkyll)adenine, 2-(aminopropyl)adenine, 2-(methylthio)-N⁶-(isopentenyl)adenine, 6-(alkyl)adenine, 6-(methyl)adenine, 7-(deaza)adenine, 8-(alkenyl)adenine, 8-(alkyl)adenine, 8-(alkynyl)adenine, 8-(amino)adenine, 8-(halo)adenine, 8-(hydroxyl)adenine, 8-(thioalkyl)adenine, 8-(thiol)adenine, N⁶-(isopentyl)adenine, N⁶-(methyl)adenine, N⁶, N⁶-(dimethyl)adenine, 2-(alkyl)guanine, 2-(propyl)guanine, 6-(alkyl)guanine, 6-(methyl)guanine, 7-(alkyl)guanine, 7-(methyl)guanine, 7-(deaza)guanine, 8-(alkyl)guanine, 8-(alkenyl)guanine, 8-(alkynyl)guanine, 8-(amino)guanine, 8-(halo)guanine, 8-(hydroxyl)guanine, 8-(thioalkyl)guanine, 8-(thiol)guanine, N-(methyl)guanine, 2-(thio)cytosine, 3-(deaza)-5-(aza)cytosine, 3-(alkyl)cytosine, 3-(methyl)cytosine, 5-(alkyl)cytosine, 5-(alkynyl)cytosine, 5-(halo)cytosine, 5-(methyl)cytosine, 5-(propynyl)cytosine, 5-(propynyl)cytosine, 5-(trifluoromethyl)cytosine, 6-(azo)cytosine, N⁴-(acetyl)cytosine, 3-(3-amino-3-carboxypropyl)uracil, 2-(thio)uracil, 5-(methyl)-2-(thio)uracil, 5-(methylaminomethyl)-2-(thio)uracil, 4-(thio)uracil, 5-(methyl)-4-(thio)uracil, 5-(methylaminomethyl)-4-(thio)uracil, 5-(methyl)-2,4-(dithio)uracil, 5-(methylaminomethyl)-2,4-(dithio)uracil, 5-(2-aminopropyl)uracil, 5-(alkyl)uracil, 5-(alkynyl)uracil, 5-(allylamino)uracil, 5-(aminoallyl)uracil, 5-(aminoalkyl)uracil, 5-(guanidiniumalkyl)uracil, 5-(1,3-diazole-1-alkyl)uracil, 5-(cyanoalkyl)uracil, 5-(dialkylaminoalkyl)uracil, 5-(dimethylaminoalkyl)uracil, 5-(halo)uracil, 5-(methoxy)uracil, uracil-5-oxyacetic acid, 5-(methoxycarbonylmethyl)-2-(thio)uracil, 5-(methoxycarbonyl-methyl)uracil, 5-(propynyl)uracil, 5-(propynyl)uracil, 5-(trifluoromethyl)uracil, 6-(azo)uracil, dihydrouracil, N³-(methyl)uracil, 5-uracil (i.e., pseudouracil), 2-(thio)pseudouracil, 4-(thio)pseudouracil, 2,4-(dithio)psuedouracil, 5-(alkyl)pseudouracil, 5-(methyl)pseudouracil, 5-(alkyl)-2-(thio)pseudouracil, 5-(methyl)-2-(thio)pseudouracil, 5-(alkyl)-4-(thio)pseudouracil, 5-(methyl)-4-(thio)pseudouracil, 5-(alkyl)-2,4-(dithio)pseudouracil, 5-(methyl)-2,4-(dithio)pseudouracil, 1-substituted pseudouracil, 1-substituted 2(thio)-pseudouracil, 1-substituted 4-(thio)pseudouracil, 1-substituted 2,4-(dithio)pseudouracil, 1-(aminocarbonylethylenyl)-pseudouracil, 1-(aminocarbonylethylenyl)-2(thio)-pseudouracil, 1-(aminocarbonylethylenyl)-4-(thio)pseudouracil, 1-(aminocarbonylethylenyl)-2,4-(dithio)pseudouracil, 1-(aminoalkylaminocarbonylethylenyl)-pseudouracil, 1-(aminoalkylaminocarbonylethylenyl)-2(thio)-pseudouracil, 1-(aminoalkylaminocarbonylethylenyl)-4-(thio)pseudouracil, 1-(aminoalkylaminocarbonylethylenyl)-2,4-(dithio)pseudouracil, 1,3-(diaza)-2-(oxo)-phenoxazin-1-yl, 1-(aza)-2-(thio)-3-(aza)-phenoxazin-1-yl, 1,3-(diaza)-2-(oxo)-phenthiazin-1-yl, 1-(aza)-2-(thio)-3-(aza)-phenthiazin-1-yl, 7-substituted 1,3-(diaza)-2-(oxo)-phenoxazin-1-yl, 7-substituted 1-(aza)-2-(thio)-3-(aza)-phenoxazin-1-yl, 7-substituted 1,3-(diaza)-2-(oxo)-phenthiazin-1-yl, 7-substituted 1-(aza)-2-(thio)-3-(aza)-phenthiazin-1-yl, 7-(aminoalkylhydroxy)-1,3-(diaza)-2-(oxo)-phenoxazin-1-yl, 7-(aminoalkylhydroxy)-1-(aza)-2-(thio)-3-(aza)-phenoxazin-1-yl, 7-(aminoalkylhydroxy)-1,3-(diaza)-2-(oxo)-phenthiazin-1-yl, 7-(aminoalkylhydroxy)-1-(aza)-2-(thio)-3-(aza)-phenthiazin-1-yl, 7-(guanidiniumalkylhydroxy)-1,3-(diaza)-2-(oxo)-phenoxazin-1-yl, 7-(guanidiniumalkylhydroxy)-1-(aza)-2-(thio)-3-(aza)-phenoxazin-1-yl, 7-(guanidiniumalkylhydroxy)-1,3-(diaza)-2-(oxo)-phenthiazin-1-yl, 7-(guanidiniumalkylhydroxy)-1-(aza)-2-(thio)-3-(aza)-phenthiazin-1-yl, 1,3,5-(triaza)-2,6-(dioxa)-naphthalene, inosine, xanthine, hypoxanthine, nubularine, tubercidine, isoguanisine, inosinyl, 2-aza-inosinyl, 7-deaza-inosinyl, nitroimidazolyl, nitropyrazolyl, nitrobenzimidazolyl, nitroindazolyl, aminoindolyl, pyrrolopyrimidinyl, 3-(methyl)isocarbostyrilyl, 5-(methyl)isocarbostyrilyl, 3-(methyl)-7-(propynyl)isocarbostyrilyl, 7-(aza)indolyl, 6-(methyl)-7-(aza)indolyl, imidizopyridinyl, 9-(methyl)-imidizopyridinyl, pyrrolopyrizinyl, isocarbostyrilyl, 7-(propynyl)isocarbostyrilyl, propynyl-7-(aza)indolyl, 2,4,5-(trimethyl)phenyl, 4-(methyl)indolyl, 4,6-(dimethyl)indolyl, phenyl, napthalenyl, anthracenyl, phenanthracenyl, pyrenyl, stilbenyl, tetracenyl, pentacenyl, difluorotolyl, 4-(fluoro)-6-(methyl)benzimidazole, 4-(methyl)benzimidazole, 6-(azo)thymine, 2-pyridinone, 5-nitroindole, 3-nitropyrrole, 6-(aza)pyrimidine, 2-(amino)purine, 2,6-(diamino)purine, 5-substituted pyrimidines, N²-substituted purines, N⁶-substituted purines, O⁶-substituted purines, substituted 1,2,4-triazoles, pyrrolo-pyrimidin-2-on-3-yl, 6-phenyl-pyrrolo-pyrimidin-2-on-3-yl, para-substituted-6-phenyl-pyrrolo-pyrimidin-2-on-3-yl, ortho-substituted-6-phenyl-pyrrolo-pyrimidin-2-on-3-yl, bis-ortho-substituted-6-phenyl-pyrrolo-pyrimidin-2-on-3-yl, para-(aminoalkylhydroxy)-6-phenyl-pyrrolo-pyrimidin-2-on-3-yl, ortho-(aminoalkylhydroxy)-6-phenyl-pyrrolo-pyrimidin-2-on-3-yl, bis-ortho-(aminoalkylhydroxy)-6-phenyl-pyrrolo-pyrimidin-2-on-3-yl, pyridopyrimidin-3-yl, 2-oxo-7-amino-pyridopyrimidin-3-yl, 2-oxo-pyridopyrimidine-3-yl, or any O-alkylated or N-alkylated derivatives thereof. Alternatively, substituted or modified analogs of any of the above bases and “universal bases” can be employed.

[0380] As used herein, a universal nucleobase is any modified or nucleobase that can base pair with all of the four naturally occurring nucleobases without substantially affecting the melting behavior, recognition by intracellular enzymes or activity of the oligonucleotide duplex. Some exemplary universal nucleobases include, but are not limited to, 2,4-difluorotoluene, nitropyrrolyl, nitroindolyl, 8-aza-7-deazaadenine, 4-fluoro-6-methylbenzimidazle, 4-methylbenzimidazle, 3-methyl isocarbostyrilyl, 5-methyl isocarbostyrilyl, 3-methyl-7-propynyl isocarbostyrilyl, 7-azaindolyl, 6-methyl-7-azaindolyl, imidizopyridinyl, 9-methyl-imidizopyridinyl, pyrrolopyrizinyl, isocarbostyrilyl, 7-propynyl isocarbostyrilyl, propynyl-7-azaindolyl, 2,4,5-trimethylphenyl, 4-methylinolyl, 4,6-dimethylindolyl, phenyl, napthalenyl, anthracenyl, phenanthracenyl, pyrenyl, stilbenyl, tetracenyl, pentacenyl, and structural derivatives thereof (see for example, Loakes, 2001, Nucleic Acids Research, 29, 2437-2447).

[0381] The terms “subject” and “individual” are used interchangeably herein, and refer to an animal, for example a human, to whom treatment, including prophylactic treatment, with a pharmaceutical composition according to the present invention, is provided. The term “subject” as used herein refers to human and non-human animals. The term “non-human animals” and “non-human mammals” are used interchangeably herein, and includes all vertebrates, e.g., mammals, such as non-human primates, (particularly higher primates), sheep, dog, rodent (e.g. mouse or rat), guinea pig, goat, pig, cat, rabbits, cows, and non-mammals such as chickens, amphibians, reptiles etc. In one embodiment, the subject is human. In another embodiment, the subject is an experimental animal or animal substitute as a disease model. The term does not denote a particular age or sex. Thus, adult and newborn subjects, as well as fetuses, whether male or female, are intended to be covered. Examples of subjects include humans, dogs, cats, cows, goats, and mice. The term subject is further intended to include transgenic species. In some embodiments, the subject can be of European ancestry. In some embodiments, the subject can be of African American ancestry. In some embodiments, the subject can be of Asian ancestry.

[0382] A “pharmaceutical composition” refers to a composition that usually contains an excipient, such as a pharmaceutically acceptable carrier that is conventional in the art and that is suitable for administration to cells or to a subject. In addition, compositions for topical (e.g., oral mucosa, respiratory mucosa) and/or oral administration can be in the form of solutions, suspensions, tablets, pills, capsules, sustained-release formulations, oral rinses, or powders, as known in the art and described herein. The compositions also can include stabilizers and preservatives. For examples of carriers, stabilizers and adjuvants, University of the Sciences in Philadelphia (2005) Remington: The Science and Practice of Pharmacy with Facts and Comparisons, 21st Ed.

[0383] The terms “significantly different from,”, “statistically significant,” and similar phrases refer to comparisons between data or other measurements, wherein the differences between two compared individuals or groups are evidently or reasonably different to the trained observer, or statistically significant (if the phrase includes the term “statistically” or if there is some indication of statistical test, such as a p-value, or if the data, when analyzed, produce a statistical difference by standard statistical tests known in the art).

[0384] The terms “increased,” “increase” or “enhance” in connection with the amount of TS3 or TS1 PLXNA4 transcript in a biological sample obtained from a subject are all used herein to generally mean an increase by a statically significant amount. For the avoidance of any doubt, the terms “increased”, “increase” or “enhance” or “activate” means an increase of at least 10% as compared to a reference level, for example an increase of at least about 20%, or at least about 30%, or at least about 40%, or at least about 50%, or at least about 60%, or at least about 70%, or at least about 80%, or at least about 90% or up to and including a 100% increase or any increase between 10-100% as compared to a reference value or level, or at least about a 1.5-fold, at least about a 1.6-fold, at least about a 1.7-fold, at least about a 1.8-fold, at least about a 1.9-fold, at least about a 2-fold, at least about a 3-fold, or at least about a 4-fold, or at least about a 5-fold, at least about a 10-fold increase, any increase between 2-fold and 10-fold, at least about a 25-fold increase, or greater as compared to a reference level. In some embodiments, an increase is at least one standard deviation greater than, or at least two standard deviations, or more, greater than a median or mean reference level. Such median or mean reference levels can be obtained, for example, from five or more samples obtained from subjects not having Alzheimer's disease, or from five or more samples obtained from the same subject at different timepoints.

[0385] In embodiments of the various aspects disclosed herein, the reference level can be obtained or measured in a reference biological sample, such as a reference sample obtained from an age-matched normal control (e.g., an age-matched subject not having Alzheimer's disease), or a reference sample from the same subject at an earlier timepoint, for example, a “first biological sample.” A “reference value” is thus, in some embodiments, a predetermined reference level, such as an average or median amount or level of TS3 or TS1 PLXNA4 transcript obtained from, for example, biological samples from a population of healthy subjects that are in the chronological age group matched with the chronological age of the tested subject.

[0386] In embodiments of the various aspects disclosed herein, the reference can be a normal healthy subject with no genetic susceptibility for AD. For example, a normal healthy subject is not a carrier of any of the late onset AD risk associated alleles described herein or is not diagnosed with any forms of AD such as early-onset autosomal-dominant AD, or any neurodegenerative disorders. The reference can be also a control sample, a pooled sample of control individuals or a numeric value or range of values based on the same.

[0387] As used herein, the terms “biological sample” or “subject sample” or “sample” refer to a quantity of tissue or fluid, or a cell or population of cells obtained from a subject. In some embodiments, the biological sample is a blood sample, including, for example, a serum sample, or a plasma sample. Most often, the sample has been removed from a subject, but the term “biological sample” can also, in some embodiments, refer to cells or tissue or a quantity of tissue or fluid analyzed in vivo, i.e. without removal from the subject. A biological sample or tissue sample includes, but is not limited to, blood, plasma, serum, cerebrospinal fluid, lymph fluid, bone marrow, tumor biopsy, urine, stool, sputum, pleural fluid, nipple aspirates, lymph fluid, the external sections of the skin, lung tissue, adipose tissue, connective tissue, sub-epithelial tissue, epithelial tissue, liver tissue, kidney tissue, uterine tissue, respiratory tissues, breast tissue, gastrointestinal tissue, and genitourinary tract tissue, tears, saliva, milk, cells (including, but not limited to, blood cells), biopsies, scrapes (e.g., buccal scrapes), tumors, organs, and also samples of an in vitro cell culture constituent. Often, a “biological sample” can comprise cells from the subject, but the term can also refer to non-cellular biological material, such as non-cellular fractions of blood, saliva, or urine.

[0388] The term “reduced” or “reduce” or “decrease” as used herein generally means a decrease by a statistically significant amount relative to a reference. However, for avoidance of doubt, “reduced” means statistically significant decrease of at least 10% as compared to a reference level, for example a decrease by at least 20%, at least 30%, at least 40%, at least t 50%, or least 60%, or least 70%, or least 80%, at least 90% or more, up to and including a 100% decrease (i.e. absent level as compared to a reference sample), or any decrease between 10-100% as compared to a reference level, as that term is defined herein.

[0389] As used herein, the term “comprising” means that other elements can also be present in addition to the defined elements presented. The use of “comprising” indicates inclusion rather than limitation.

[0390] As used herein the term “consisting essentially of” refers to those elements required for a given embodiment. The term permits the presence of additional elements that do not materially affect the basic and novel or functional characteristic(s) of that embodiment of the invention.

[0391] The term “consisting of” refers to compositions, methods, and respective components thereof as described herein, which are exclusive of any element not recited in that description of the embodiment.

[0392] Further, unless otherwise required by context, singular terms shall include pluralities and plural terms shall include the singular.

[0393] Further than in the operating examples, or where otherwise indicated, all numbers expressing quantities of ingredients or reaction conditions used herein should be understood as modified in all instances by the term “about.” The term “about” when used in connection with percentages can mean±1%.

[0394] It should be understood that this invention is not limited to the particular methodology, protocols, and reagents, etc., described herein and as such can vary. The terminology used herein is for the purpose of describing particular embodiments only, and is not intended to limit the scope of the present invention, which is defined solely by the claims.

[0395] The disclosure is further illustrated by the following examples which should not be construed as limiting. The examples are illustrative only, and are not intended to limit, in any manner, any of the aspects described herein. The following examples do not in any way limit the invention.

### Examples

[0396] Alzheimer's disease is the most frequent age-related dementia affecting 5.4 million Americans including 13% of people ages 65 and older and over 40% of people ages 85 and older.¹ Genetic factors account for much of the risk for developing AD with heritability estimates between 60% and 80%.² The apolipoprotein E (APOE) ε4 allele is a well-recognized major risk factor for late onset AD, increasing the odds of disease in a dose-dependent fashion.³ Common polymorphisms in ten additional genes have been robustly established as risk factors for AD using large-scale genome-wide association studies (GWAS) and meta-analyses.^{4,5} These polymorphisms link to mechanisms of AO metabolism, lipid metabolism, inflammation, and axon guidance.^{6,7} However, the heritability of AD explained by APOE is about 17.5% and by each of the novel GWAS loci is less than 1%, suggesting that less than 30% of the genetic contribution to AD is explained by known common polymorphisms.^{4,8} The remaining heritability may be due to additional common variants of weaker effect, rare variants, copy-number variants, insertion-deletion polymorphisms, and gene-gene and gene-environment interactions.^{9,10}.

[0397] As described herein, we conducted a two-stage family-based AD GWAS using a novel method which incorporates the entire family structure and reduces diagnostic misclassification in the association test, and renders a result that is less prone to type I error, even for rare variants.¹¹ We obtained genome wide significant evidence of association with PLXNA4, a gene which has not been previously linked to AD. Subsequent in silico and molecular studies indicated that intronic polymorphisms affect alternative transcription of PLXNA4 isoforms. We observed isoform-specific effects of PLXNA4 on hyperphosphorylation of tau protein, a terminal step leading to breakdown of neuronal signaling and microtubule formation.

### Methods

[0398] Subjects: The GWAS was performed using a community-based sample consisting of 61 incident AD cases and 2,530 cognitively normal controls from 1,232 families in the Framingham Heart Study (FHS). The top findings were evaluated in a second cohort including 1,819 AD cases and 1,969 controls from 2,265 families containing multiple members affected by AD in the National Institute on Aging—Late Onset Alzheimer Disease (NIA-LOAD) Study. Clinical, demographic, pedigree and genetic data for both cohorts were obtained from dbGaP on the worldwide web at www.ncbi.nlm.nih.gov/gap. Additional details about the ascertainment, evaluation and characteristics of these subjects are provided.

[0399] Statistical Analysis:

[0400] Details of the statistical analysis, including a comprehensive description of procedures for quality control of the GWAS data, evaluation of population substructure, genotype imputation, and genetic association and bioinformatics methods are available.

[0401] Amyloid Precursor Protein (APP), Amyloid β (Aβ) and Tau Analyses:

[0402] Methods for investigating the effect of PLXNA4 on the processing of APP, Aβ and tau protein are presented.

[0403] Analyses of Gene Expression in Brain:

[0404] Gene expression experiments were conducted on brain tissue specimens obtained from 17 autopsied subjects including five controls (Braak stage 0), five early-stage AD cases (Braak stages 1-2), and nine late-stage AD cases (Braak stages 3-4) in the Mount Sinai/Bronx Veterans Administration (VA) Medical Center/Department of Psychiatry Brain Bank. Normal controls had no history of any psychiatric or neurological disorders and no discernible neuropathological lesions. Ascertainment, cognitive assessment, neuropathological assessment, and stratification of these subjects were previously described.¹² The Institutional Review Boards of Pilgrim Psychiatric Center, Mount Sinai School of Medicine, and the Bronx Va. Medical Center approved all assessment and post-mortem procedures. Additional subject details and procedures for quantification of PLXNA4 expression are provided.

[0405] Analyses of Gene Expression in Blood:

[0406] The correlation of PLXNA4 SNP genotypes and expression in blood was evaluated in a sample of 116 cognitively healthy Korean volunteers ages 11-45 (mean=28.2+6.0 years).¹³ Details of DNA and RNA preparation, PLXNA4 isoform quantification, SNP genotyping and statistical analysis of these data are available.

### Results and Discussion

[0407] The mean onset age of AD among the 61 incident cases in the FHS dataset was about 10 years older than that for the 1,819 AD cases in the NIA-LOAD database. The frequency of the APOE ε4 allele in unaffected subjects (FHS: n=2,530, NIA-LOAD: n=1,969) was comparable between the two family datasets, but the ε4/ε4 genotype frequency was approximately nine times greater in AD subjects in the NIA-LOAD cohort compared to AD subjects in the FHS cohort. In addition, the proportion of AD subjects lacking ε4 was about three times larger in the FHS cohort. Among the unaffected family members in the NIA-LOAD cohort, 439 had propensity scores of at least 80% (i.e., risk to develop AD accounting for parental affection status and age at onset/exam and adjusting for population substructure) and 809 had propensity scores of zero.

[0408] Analysis of the 341,492 genotyped SNPs in the FHS discovery sample revealed strong evidence of association with AD in multiple regions of the genome (Table 1). The distribution of observed p-values for the entire set of SNPs indicated little genomic inflation (X=1.01). Genome-wide significant associations were found with SNPs in ITIH3 (rs9311482: (β=1.3, P=5×10⁻⁹), PLXNA4 (rs277484: β=1.1)P=9×10⁻¹° and MYO18B (rs13057714: β=1.0, P=9×10⁻⁹) (Table 2). SNPs located in IGSF21 and between GPR149 and MME were also significant at P<10⁻⁶. Each dose of the minor alleles for these SNPs increased AD risk by at least one unit (mean liability on the normalized scale). We attempted to discover additional association signals in IGSF21, ITIH3, PLNXA4, and MYO18B by evaluating 1,515 genotyped and accurately imputed SNPs (RSQ≧0.8) in the FHS datasets. One other IGSF21 SNP and five additional PLNXA4SNPs were significant after adjustment for multiple testing (P<3.3×10⁻⁵). The most notable result was obtained for PLNXA4 SNP rs277472 (P=2.0×10⁻¹⁰) (FIG. 1A). No additional SNPs from the ITIH3 or the MYO18B met the significance threshold after multiple testing corrections.

[0409] Next, we tested association of 1,502 genotyped and accurately imputed SNPs (RSQ≧≧8) SNPs in IGSF2, ITIH3, PLXN, 44, and MYO18B in the NIA-LOAD dataset (Table 1). Further analysis revealed significant association of the AD propensity score with ten other PLXNA4 SNPs after multiple testing correction (SNPs with P<10⁻⁵: rs11761937, (3=−0.09, P=5.8×10⁻⁶ and rs10236235, (3=−0.07, P=9.7×10⁻⁶) in the NIA-LOAD dataset (FIG. 1B). Genotyped SNP rs11761937 and imputed SNP rs10236235 are in complete linkage disequilibrium (LD, r²=1.0). Each dose of the minor allele T for rs11761937 accounts for a 9% reduction in disease penetrance. These results were not meaningfully changed after adjustment for sex and the number of APOE ε4 alleles, although there was evidence for interaction between APOE and two SNPs on AD susceptibility (rs11761937: (3INT=0.07, PINT=0.012; rs10236235: (3INT=0.07, PINT=0.0028),

[0410] Of 337 SNPs from IGSF21, PLXNA4, and MYO18B common to both datasets, five PLXNA4 SNPs were significant in the combined datasets after multiple testing correction, most notably rs10236235 (FHS: (3=−0.13, P=0.1 1; NIA-LOAD: (3=−0.07, P=9.7×10⁻⁶; total: (3=−0.07, P=4.4×10⁻⁷). This result was not meaningfully different (combined P=4.2×10⁻⁶) in the meta-analysis using the total number of affected subjects in each study. Gene-based analyses including the set of 337 SNPs confirmed association with PLXNA4 in the FHS (p=0.004), NIA-LOAD (p=0.03), and combined (p=3.6×10⁻⁴) datasets (Table 2).

[0411] PLXNA4 is a member of a family of receptors for transmembrane, secreted and GPI-anchored semaphorins in vertebrates¹⁴ and is a receptor for secreted semaphorin class 3 (SEMA3A) and class 6 (SEMA6) proteins which play an important role in semaphorin signaling and axon guidance.¹⁵ Accumulation of SEMA3A was previously detected in susceptible areas of the hippocampal neurons during AD progression and colocalized with phosphorylated tau.¹⁶ A phosphorylated CRMP2 protein, an intracellular signaling molecule for the semaphorin-plexin signaling pathway, has been observed in neurofibrillary tangles in brains of autopsied AD patients.¹⁷ The staining pattern of SEMA6, which is present in fibers and nerve terminals, is disrupted in brains of patients with AD.¹⁸

[0412] There are three known alternatively spliced PLXNA4 transcripts. As used herein, the “TS1 PLXNA4 transcript” or “TS1” is the full-length PLXNA4 transcript that contains 31 exons and encodes an isoform with 1,894 residues. As used herein, “TS2 PLXNA4 transcript” or “TS2” and “TS3 PLXNA4 transcript” or “TS3” refer to two alternatively spliced transcripts each of which contains three exons yielding shorter isoforms of 522 residues (TS2) and 492 residues (TS3), respectively. As shown herein, the distinct PLXNA4 association peaks in the discovery and replication datasets flank an exon that is present only in TS3.

[0413] Further scrutiny of the PLXNA4 findings revealed that the most significant SNPs in each dataset clustered in distinct regions approximately 78,360 base pairs apart in intron 2 of the largest transcript (TS1) and flank an alternatively spliced exon present only in a much shorter transcript (TS3) (FIG. 1C). We screened the DNA sequences surrounding the SNPs most significantly associated with AD susceptibility in each dataset for intronic splicing regulatory elements (IRE) that might be impacted by an allelic difference at the site of the SNP. The sequence surrounding the most significantly associated SNP in the FHS dataset (rs277472) contained three IRE motifs in the presence of the risk allele A, but none if the alternative allele was there instead (FIG. 1D). In contrast, one IRE motif was identified in the sequence surrounding the most significantly associated SNP in the combined dataset (rs10236235) but only in the presence of the protective allele T (FIG. 1E). Other AD-associated SNPs were also predicted to impact splicing. Bioinformatic evaluation confirmed that the longer isoform contains a transmembrane domain, while the shorter forms are predicted as secreted forms (FIG. 1F), indicating that different isoforms can have distinct functional consequences related to AD.

[0414] To determine whether PLXNA4 isoforms are differentially involved in APP processing and Aβ production, we transfected one of the three isoforms PLXNA4-Myc into HEK293 cells stably expressing APP751 and analyzed total APP in cell lysates and APPsα and Aβ 40 and 42 in the medium. Neither over-expressing PLXNA4 isoforms affected APPsα secretion or Aβ 40 and 42 production. These results indicate that PLXNA4 is not involved in AD through the α- or β-secretase pathways.

[0415] Involvement of plexin-A4 signaling in tau phosphorylation was examined by transfecting cDNAs for the full-length (TS1) or 3′ C-terminal truncated short isoforms (TS2 and TS3) of human PLXNA4-Myc into SH-SY5Y P301L cells (SH-SY5Y cells stably expressing the P301L tau mutant) and stimulated with or without 3 nM recombinant Semaphorin-3A (SEMA3A-FC). Immunoblotting with AT8 (anti-phospho-Tau at Ser²⁰²/Thr²⁰⁵) showed that tau phosphorylation was induced by SEMA3A stimulation, which was enhanced by over-expression of TS1 (FIG. 2A). In contrast, over-expression of either TS2 or TS3 inhibited tau phosphorylation under stimulation by SEMA3A. Since TS2 and TS3 are secretory molecules with the SEMA3A binding site in the extracellular domain, we assume that the inhibitory effect is mediated by the competitive binding of the short isoforms to SEMA3A. Pull-down assays confirmed that the short isoforms, but not full-length PLXNA4, specifically co-precipitated with SEMA3A in the media (FIG. 2B). These data demonstrate that the short isoforms are secreted as expected and bind to SEMA3A thereby inhibiting signaling. Further examination in rat primary hippocampal neurons illustrated that transient expression of Myc-tagged full-length PLXNA4 elevated SEMA3A-induced tau phosphorylation (Myc⁺ AT8⁺ cells, red staining, FIG. 2C), while expression of Myc-tagged shorter isoforms reduced SEMA3A-induced tau phosphorylation in neurons.

[0416] Expression of the TS1 and TS3 was quantified in brain tissue specimens from the middle frontal gyms (Brodmann area 9) from 19 autopsied subjects including five controls, five early-stage AD cases, and nine late-stage AD cases. Late-stage AD cases compared to controls had 1.9-fold increased expression of TS1 (P=6.0×10⁻⁴) and a more modestly increased expression of TS3 (P=0.021) (Table 3, FIG. 3A). These patterns were similar in the comparison of early-stage AD cases to controls (Table 3) and are not age-related. In the combined sample of AD cases and controls, TS1 level was significantly correlated with the clinical dementia rating score (r²=0.75, P=2.2×10⁻⁴) and several measures of AD neuropathology (r²˜0.5, P<0.05), but the correlations of TS3 level with these traits were much smaller. These findings indicate that elevation in TS1 level increases risk for developing AD.

[0417] Association of five significantly associated PLXNA4 SNPs with expression of the TS1 and TS3 isoforms was evaluated in serum from 116 young healthy controls. Expression levels were significantly lower for TS3 (p=8.62×10⁻⁹) and TS1 (p=0.024) among individuals homozygous for the protective rs1593222 C allele under a dominant model (FIG. 3B). A similar but less significant trend was noted for the additive model. Similar patterns were observed with other SNPs, most notably with rs6959579 (p=1.89×10⁻⁵) and rs17166338 (p=0.0095) for TS3 under a dominant model, but the strength of the association may have been lower with some SNPs because of fewer homozygotes for the protective alleles. These results indicate that possession of at least one copy of the alternate allele, which is the AD risk allele for each of these SNPs, is correlated with higher levels of TS3 and possibly TS1 in serum decades before AD typically occurs.

[0418] As demonstrated herein, we identified significant association between AD susceptibility and SNPs in PLXNA4 using a family-based approach. The top-ranked SNPs in the discovery and replication datasets are located in a single intron and surround an exon that is skipped in the processing of the full-length mRNA transcript. We also demonstrated that the full-length isoform (TS1), but not the shorter isoforms (TS2 and TS3), of PLXNA4 (the protein encoded by PLXNA4) increased tau phosphorylation in SH-SY5Y cells stably expressing the P301L tau mutant and in primary rat neurons when stimulated by SEMA3A. Significantly higher levels of TS1 and TS3 in cortical tissue were observed in late-stage AD cases compared to controls. By comparison, transfection of either isoform into HEK293 cells stably expressing APP failed to show differential effects on APP processing or Aβ production. Taken together, our results indicate that PLXNA4-mediated tau phosphorylation is an independent upstream event leading to AD-related tangle formation in neurons.

[0419] PLXNA4 is a member of a family of receptors for transmembrane, secreted and GPI-anchored semaphorins in vertebrates¹⁴ and is a receptor for secreted semaphorin class 3 (SEMA3A) and class 6 (SEMA6) proteins which play an important role in semaphorin signaling and axon guidance.¹⁵ Accumulation of SEMA3A was previously detected in susceptible areas of the hippocampal neurons during AD progression and colocalized with phosphorylated tau.¹⁶ A phosphorylated CRMP2 protein, an intracellular signaling molecule for the semaphorin-plexin signaling pathway, has been observed in neurofibrillary tangles in brains of autopsied AD patients.¹⁷ The staining pattern of SEMA6, which is present in fibers and nerve terminals, is disrupted in brains of patients with AD.¹⁸ These reports and our study collectively indicate that disrupted semaphorin-plexin signaling is involved in AD pathogenesis, specifically through tau phosphorylation leading to tangle formation and neuronal death.

[0420] There are three known alternatively spliced PLXNA4 transcripts. The full-length transcript (TS1) contains 31 exons and encodes an isoform with 1,894 residues. Two alternatively spliced transcripts each contain three exons yielding shorter isoforms of 522 residues (TS2) and 492 residues (TS3), respectively. The distinct PLXNA4 association peaks in the discovery and replication datasets flank an exon that is present only in TS3. Our bioinformatic analysis identified predicted intronic splicing regulatory elements near the most strongly associated SNP in each dataset. However, our finding of increased expression of both TS1 and TS3 indicate that the genetic mechanism can also involve transcription regulatory elements.

[0421] Our experiments using a neuronal cell line and rat primary neurons suggest that the longer transmembrane isoform of PLXNA4 increases tau phosphorylation while shorter secreted isoforms inhibit the effect. The specific findings supporting this conclusion include SEMA3A induced phosphorylation of tau, expression of full-length PLXNA4 coupled to SEMA3A enhanced tau phosphorylation, and the shorter isoforms binding to SEMA3A and blocking SEMA3A/PLXNA4 signaling for tau phosphorylation. Semaphorin-plexin signaling is known to regulate axon guidance in the development of sympathetic nervous system and cerebral cortex.¹⁹⁻21 Previously, binding of SEMA3A to truncated PLXNA proteins was demonstrated to have a dominant negative effect on cortical growth cone collapse.²² Our data demonstrate that disruption of this signaling can also contribute to the acceleration of tau phosphorylation leading to neurofibrillary tangle formation. Taken together, our findings point to a novel mechanism for AD-related tangle formation, implying that reduced expression of PLXNA4, and the TS1 isoform in particular, in brain is crucial to maintain healthy neurons.

[0422] A direct link of PLXNA4 expression to AD is supported by the evidence described herein of increased expression of TS1 and TS3 isoforms in post-mortem neuronal tissue from AD cases compared to controls. Importantly, the findings that the relative increase of TS1 is much greater than TS3 in AD cases, and TS1 expression is significantly correlated with clinical and neuropathological severity measures of AD, are consistent with our observation of increased phosphorylation of tau by SEMA3A bound specifically to TS1. In addition, our findings in sera from a group of young controls suggest that differential expression of these isoforms may be genetically regulated beginning in early life.

[0423] Previous GWAS and candidate gene studies involving the FHS and NIA-LOAD datasets have successfully identified several AD genes including SORL1, BIN1, MS4A4/MS4A6A, EPHA7, ABCA7, CD33, and CD2AP),^{4,5,23-25} but the portion of evidence for these associations attributable to either of these datasets is relatively small and the robust associations in these loci are with common SNPs (MAF>0.1). We increased the potential for gene discovery in the FHS and NIA-LOAD datasets by applying an analytical method that leverages the family structure that is otherwise ignored when using generalized estimating equations or sibpair-based analysis. This method is applicable to extended pedigrees and is robust for detecting association with less common SNPs (0.01≦MAF<0.1).¹¹ In addition, we applied a novel approach to address the differences between the FHS and NIA-LOAD datasets. We substituted a quantitative measure (propensity score) of disease liability for AD status in the NIA-LOAD dataset, which has a skewed distribution of age at onset and is enriched for familial AD in comparison with the community-based FHS sample. Our method using propensity scores as a surrogate for AD susceptibility assigned a >50% probability for future development of AD to 60% of the cognitively normal subjects in the NIA-LOAD cohort. This indicates that analyses using affection status in families with multiple affected members have much less power to detect true associations without adjusting for misclassification of unaffected relatives.

[0424] Our gene-based test results indicate that the significant results with individual PLXNA4 SNPs are not false positive findings. Since subjects in both studies are Caucasians of European origin, the MAFs for the top-ranked SNPs are similar across datasets and there is no LD (r²<0.2) among SNPs from the two association peaks, a more likely explanation for the different association patterns is allelic heterogeneity. Another concern is that the in vitro tau phosphorylation experiments do not indicate which tau kinases activate tau phosphorylation. Cdk5 and glycogen synthase kinase-3β are known to be activated by SEMA3A by phosphorylating CRMP2 to mediate growth cone collapse.^{26,27} Since these are established tau kinases, it is most likely that PLXNA4 induces tau phosphorylation via activation of these two kinases. Also, because these results are based on the transient expression of PLXNA4 molecules, it is crucial to evaluate the influence of PLXNA4 on tau phosphorylation in more physiological conditions. Isoform-specific gene-targeting of PLXNA4 in mice is a potential future study in vivo.

[0425] In summary, our novel genetic association findings and results of molecular and cell biology experiments in cell lines, rat neurons, and human blood and brain demonstrate that PLXNA4 is involved in AD pathogenesis. Evidence supporting transcriptional regulation of PLXNA4 isoforms that have differential effect on tau phosphorylation and, hence, tangle formation indicates a new drug target.

[0426] Replication and Extended Analysis of PLXNA4:

[0427] We tested association of 746 genotyped and accurately imputed SNPs (RSQ≧0.8) from PLXNA4 in the NIA-LOAD dataset (FIG. 4B), but were unable to replicate any of the top-ranked SNPs obtained in the FHS sample (Table 3). However, 16 of the 746 PLXNA4 SNPs showed significant association at P<10⁻³ in a model using the normalized liability score, and these association signals were improved using the normalized propensity score (Table 3). We observed an association trend in the same effect direction with rs277470 in the NIA-LOAD using the propensity score (p value: FHS=2.1×10⁻¹°, NIA-LOAD=0.06, meta-analysis=4.1×10⁻⁸) (FIG. 4C). Each dose of the minor allele C for rs277470 increased the liability rank by at least one unit in FHS dataset and the propensity rank by 13% in NIA-LOAD (Table 2). The most significant finding in NIA-LOAD (FIG. 4B) was obtained with a genotyped SNP rs12539196 (p value: FHS=0.114, NIA-LOAD=3.7×10⁻⁵, meta-analysis=2.8×10⁻⁵). The minor allele C for rs12539196 decreased the liability rank by 0.09 in FHS and accounts for a 15% reduction in the propensity rank in NIA-LOAD (Table 2). The result for rs12539196 in the NIA-LOAD dataset was not meaningfully changed after adjustment for the number of APOE ε4 alleles (P=2.7×10⁻⁵) and remained significant after correction for multiple testing (P=0.0036). Further scrutiny of the PLXNA4 findings revealed that the most significant SNPs in each dataset are clustered in two distinct regions approximately 78,240 base pairs apart in intron 2 of the largest transcript (TS1) and flank an alternatively spliced exon present only in a much shorter transcript (TS3) (FIG. 4D). Bioinformatic evaluation revealed that TS1 contains a transmembrane domain, whereas the shorter isoforms are predicted to be secreted (FIG. 4E), suggesting that the longer and shorter isoforms may have distinct functional consequences related to AD. Based on this information, we performed region-based analyses including only SNPs located between 131,925,825 and 132,193,452 base pairs (including all of intron 2) encompassing the SEMA domain (FIG. 4E), and confirmed significant association for the region (Table 2) in both datasets (P value: FHS=6.3×10⁻³; NIA-LOAD=0.019; meta-analysis=3.2×10⁻⁴).

[0428] Association with PLXNA4 was further examined using summarized results from previous GWA studies reported by the Alzheimer's Disease Genetics Consortium (ADGC) for 18,901 Caucasians (9,966 cases and 8,935 controls) excluding the NIA-LOAD dataset,^{4,7} 4,896 African Americans (1,459 cases and 3,437 controls) excluding the NIA-LOAD dataset,²⁷ and 1,845 Japanese (951 cases and 894 controls).²⁸ The most significant SNPs in each population under the additive model were rs10273901 in Caucasians (minor allele frequency [MAF]=0.42; meta-analysis p value [meta-P]=3.9×10⁻⁵; odds ratio [OR]=0.85, 95% Confidence Interval [95% CI]: 0.79-0.92), rs75460865 in African Americans (MAF=0.04; meta-P=8.0×10⁻⁴; OR=1.55, 95% CI: 1.20-2.01), and rs13232207 in Japanese (MAF=0.19; P=1.2×10⁻⁴; OR=1.51, 95% CI: 1.22-1.86). The results for the Caucasian and Japanese groups remained significant after correcting for multiple testing (P=0.013 and P=0.037, respectively). Rs75460865 is located in the portion of the sequence which encodes the SEMA domain, but rs10273901 and rs13232207 are located in the PLXNA4 region that encodes the CYTO domain (FIG. 4E). Top ranked SNPs in the FHS and NIA-LOAD datasets were not associated in the other ADGC datasets (P>0.1) likely because power to detect association with several SNPs (including rs277470) having low minor allele frequencies is weaker in the ADGC datasets compared to large extended family-based samples. Because the LD structure in this region is similar across populations (FIG. 5), different association peaks among these groups is consistent with the existence of multiple distinct functionally-relevant AD-related alleles. In summary, the results in each of the ADGC ethnic samples support the association of AD with PLXNA4 SNPs.

### REFERENCES

[0429] 1. Thies W, Bleiler L. 2011 Alzheimer's disease facts and figures Alzheimers Dement 2011; 7:208-244
[0430] 2. Farrer L A. Genetics and the dementia patient. Neurologist 1997; 3:13-30
[0431] 3. Farrer L A, Cupples L A, Haines J L, et al. Effects of age, sex, and ethnicity on the association between apolipoprotein E genotype and Alzheimer disease. A meta-analysis. APOE and Alzheimer Disease Meta Analysis Consortium. JAMA 1997; 278:1349-1356
[0432] 4. Naj A C, Jun G, Beecham G W, Wang L S, et al. Common variants at MS4A4/MS4A6E, CD2AP, CD33 and EPHAl are associated with late-onset Alzheimer's disease. Nat Genet 2011; 43:436-441
[0433] 5. Hollingworth P, Harold D, Sims R, et al. Common variants at ABCA7, MS4A6A/MS4A4E, EPHAl, CD33 and CD2AP are associated with Alzheimer's disease. Nat Genet 2011; 43:429435
[0434] 6. Lill C M, Bertram L. Towards unveiling the genetics of neurodegenerative diseases. Semin Neurol 2012; 31:531-541
[0435] 7. Paulson H L, Igo I. Genetics of dementia. Semin Neurol 2012; 31:449-460
[0436] 8. So H C, Gui A H, Cherry S S, Sham P C. Evaluating the heritability explained by known susceptibility variants: a survey of ten complex diseases. Genet Epidemiol 2011; 35:310-317
[0437] 9. Manolio T A, Collins F S, Cox N J, et al. Finding the missing heritability of complex diseases. Nature 2009; 461:747-753
[0438] 10. Sherva R, Farrer L A. Power and pitfalls of the genome-wide association study approach to identify genes for Alzheimer's disease. Curr Psychiatry Rep 2011; 13:138-146
[0439] 11. Choi S H, Liu C, Dupuis J, Logue M W, Jun G. Using linkage analysis of large pedigrees to guide association analyses. BMC Proc 2011; 5 Suppl 9:S79
[0440] 12. Haroutunian V, Katsel P, Schmeidler J. Transcriptional vulnerability of brain regions in Alzheimer's disease and dementia. Neurobiol Aging 2009; 30:561-573.
[0441] 13. Kim D H, Lee S-T, Won H-H, et al. A genome-wide association study identifies novel loci associated with susceptibility to chronic myeloid leukemia. Blood 2011; 117:6906-6911
[0442] 14. Tamagnone L, Artigiani S, Chen H, et al. Plexins are a large family of receptors for transmembrane, secreted, and GPI-anchored semaphorins in vertebrates. Cell 1999; 99:71-80
[0443] 15. Suto F, Ito K, Uemura M, et al. Plexin-a4 mediates axon-repulsive activities of both secreted and transmembrane semaphorins and plays roles in nerve fiber guidance. J Neurosci 2005; 25:3628-3637
[0444] 16. Good P F, Alapat D, Hsu A, et al. A role for semaphorin 3A signaling in the degeneration of hippocampal neurons during Alzheimer's disease. J Neurochem 2004; 91:716-736
[0445] 17. Cole A R, Knebel A, Morrice N A, et al. GSK-3 phosphorylation of the Alzheimer epitope within collapsin response mediator proteins regulates axon elongation in primary neurons. J Biol Chem 2004; 279:50176-50180
[0446] 18. Hirsch E, Hu L J, Prigent A, et al. Distribution of semaphorin IV in adult human brain. Brain Res 1999; 823:67-79
[0447] 19. Waimey K E, Huang P H, Chen M, Cheng H J. Plexin-A3 and plexin-A4 restrict the migration of sympathetic neurons but not their neural crest precursors. Dev Biol 2008; 315:448-458.
[0448] 20. Sasaki Y, Cheng C, Uchida Y, et al. Fyn and Cdk5 mediate semaphorin-3A signaling, which is involved in regulation of dendrite orientation in cerebral cortex. Neuron 2002; 35:907-920.
[0449] 21. Low L K, Liu X B, Faulkner R L, Coble J, Cheng H J. Plexin signaling selectively regulates the stereotyped pruning of corticospinal axons from visual cortex. Proc Natl Acad Sci USA 2008; 105:8136-8141.
[0450] 22. Takahashi T, Fournier A, Nakamura F, et al. Plexin-Neuropilin-1 complexes form functional Semaphorin-3A receptors. Cell 1999; 99:59-69.
[0451] 23. Harold D, Abraham R, Hollingworth P, et al. Genome-wide association study identifies variants at CLU and PICALM associated with Alzheimer's disease. Nat Genet 2009; 41:10881093
[0452] 24. Rogaeva E, Meng Y, Lee J H, et al. The neuronal sortilin-related receptor SORL1 is genetically associated with Alzheimer disease. Nat Genet 2007; 39:168-177
[0453] 25. Seshadri S, Fitzpatrick A L, Ikram M A, et al. Genome-wide analysis of genetic loci associated with Alzheimer disease. JAMA 2010; 303:1832-1840
[0454] 26. Brown M, Jacobs T, Eickholt B, et al. Alpha2-chimaerin, cyclin-dependent Kinase 5/p 35, and its target collapsin response mediator protein-2 are essential components in semaphorin 3A-induced growth-cone collapse. J Neurosci 2004; 24:8994-9004.
[0455] 27. Uchida Y, Ohshima T, Sasaki Y, et al. Semaphorin3A signalling is mediated via sequential Cdk5 and GSK3beta phosphorylation of CRMP2: implication of common phosphorylating mechanism underlying axon guidance and Alzheimer's disease. Genes Cells 2005; 10:165179.

TABLE 1
Association Results for AD Using Genoytped SNPs in the FHS and NIA-Load datasets

| | | | | | FHS | | | NIA-LOAD | | | Meta-Analysis | |
|---|---|---|---|---|---|---|---|---|---|---|---|---|
| SNP | CH | POS | GENE | MA | MAF | β | P | MAF | β | P | β | P |
| rs4920448 | 1 | 18,504,791 | IGSF21 | C | 0.032 | 0.52 | 2.3 × 10⁻⁷ | 0.044 | 0.09 | 0.373 | 0.30 | 2.2 × 10⁻⁵ |
| rs9311482 | 3 | 52,838,932 | ITIH3 | A | 0.010 | 1.34 | 4.6 × 10⁻⁹ | 0.028 | −0.01 | 0.943 | 0.49 | 4.8 × 10⁻⁴ |
| n16824295 | 3 | 154,509,114 | GPR149/MME | C | 0.011 | −1.00 | 4.1 × 10⁻⁷ | 0.025 | 0.26 | 0.047 | −0.13 | 0.252 |
| rs277484 | 7 | 132,119,654 | PLXNA4 | G | 0.011 | 1.06 | 9.0 × 10⁻¹⁰ | 0.012 | 0.15 | 0.289 | 0.51 | 2.8 × ¹⁰⁻⁶ |
| n13057714 | 22 | 26,362,534 | MYO18B | T | 0.013 | 1.02 | 8.9 × 10⁻⁹ | 0.011 | 0.00 | 0.993 | 0.36 | 5.9 × 10⁻⁴ |

CH: chromosome;
POS: base pair position from build 37;
MA: minor allele;
MAF: minor allele frequency;
β: estimate from the regression model;
P: P value in each study or in meta-analysis

TABLE 2
SNP-based and gene-based association results with genotyped and imputed SNPs
for AD risk in the FHS dataset and for AD propensity score in the NIA-LOAD dataset.

| | | | FHS | | | LOAD | | | Meta-Analysis | |
|---|---|---|---|---|---|---|---|---|---|---|
| Gene or SNP | CH:POS | RA or nSNPs | RAF | β | P | RAF | β | P | B or Zscore | P |
| IGF21 | 1: 18,446,816 | C | 0.98 | 0.156 | 0.341 | 0.98 | 0.033 | 0.031 | 0.034 | 0.015 |
| rs1275684 | | 46 | NA | NA | 0.563 | NA | NA | 0.251 | 1.22 | 0.222 |
| Gene-based | | | | | | | | | | |
| IGF21 | 7: | C | 0.94 | 0.131 | 0.116 | 0.94 | 0.068 | 3.6 × 10⁻⁴ | 0.070 | 4.4 × 10⁻⁷ |
| rs1275684 | 132,006,366 | 162 | NA | NA | 0.004 | NA | NA | 0.031 | 3.57 | 3.6 × 10⁻⁴ |
| Gene-based | | | | | | | | | | |
| IGF21 | 22: | C | 0.02 | | 0.121 | 0.02 | 0.149 | 0.0044 | 0.156 | 0.001 |
| rs1275684 | 26,202,924 | 120 | NA | | 0.318 | NA | NA | 0.170 | 1.68 | 0.094 |
| Gene-based | | | | | | | | | | |

CH: chromosome;
POS: base pair position from build 37;
RA: risk allele;
nSNPs; number of SNPs tested in gene-based analysis;
RAF: risk allele frequency;
β: estimate from the regression model;
P: P value;
Z: Zscore in meta-analysis weighted by the number of SNPs in a gene;
NA: not applicable.
*Gene-based tests were conducted using all genotyped and well imputed (RSQ≧0.8) SNPs from the candidate genes containing at least one SNP with P < 0.05 in both studies.

TABLE 3
PLXNA4 isoform levels in brain from neuropathologically examined AD cases and controls

| | Control | | Early-Stage | | Late-Stage | | All AD | | Late-Stage AD | | All AD vs. | |
|---|---|---|---|---|---|---|---|---|---|---|---|---|
| | (n = 5) | | AD (n = 5) | | AD (n = 9) | | (n = 14) | | vs. Control | | Control | |
| Isoform | Mean | SE | Mean | SE | Mean | SE | Mean | SE | Mean | SE | Mean | SE |
| TS1 | 0.35 | 0.02 | 0.38 | 0.05 | 0.66 | 0.06 | 0.56 | 0.06 | 4.91 | 6.0 × 10⁻⁴ | 3.52 | 0.0028 |
| TS3 | 0.54 | 0.04 | 0.55 | 0.04 | 0.76 | 0.06 | 0.68 | 0.05 | 2.67 | 0.021 | 1.76 | 0.097 |
| TS1/TS3 | 0.67 | 0.09 | 0.67 | 0.05 | 0.88 | 0.06 | 0.81 | 0.05 | 2.02 | 0.066 | 1.38 | 0.18 |

TS1: isoform 1;
TS3: isoform 3;
SE: standard error;
*T-tests account for unequal variances

[0456] All patents and other publications identified in the specification and examples are expressly incorporated herein by reference for all purposes. These publications are provided solely for their disclosure prior to the filing date of the present application. Nothing in this regard should be construed as an admission that the inventors are not entitled to antedate such disclosure by virtue of prior invention or for any other reason. All statements as to the date or representation as to the contents of these documents is based on the information available to the applicants and does not constitute any admission as to the correctness of the dates or contents of these documents.

[0457] Although preferred embodiments have been depicted and described in detail herein, it will be apparent to those skilled in the relevant art that various modifications, additions, substitutions, and the like can be made without departing from the spirit of the invention and these are therefore considered to be within the scope of the invention as defined in the claims which follow. Further, to the extent not already indicated, it will be understood by those of ordinary skill in the art that any one of the various embodiments herein described and illustrated can be further modified to incorporate features shown in any of the other embodiments disclosed herein.

1. (canceled)

2.-49. (canceled)

50. A method for (i) inhibiting progression of Alzheimer's disease, (ii) inhibiting or reducing neurofibrillary tangles in the brain, (iii) inhibiting or reducing tau phosphorylation in the brain, or (iv) treating a subject having or at risk for Alzheimer's disease, in a subject in need thereof, the method comprising administering to a subject determined to have one or more of AD risk associated single nucleotide polymorphism (SNP) selected from: (i) SNP1 genotype A/A or A/C (or T/T or T/G in the complement) of SEQ ID NO: 1, wherein SNP1 is identified by rs277472 (SEQ ID NO: 8) on SEQ ID NO: 1, wherein SEQ ID NO. 1 is a portion of genomic nucleic acid sequence of plexin A4 (PLXNA4); (ii) SNP2 genotype T/T or T/C (or A/A or A/C in the complement) of SEQ ID NO: 1, wherein SNP2 is position 132,006,366 of SEQ ID NO: 1 identified by rs10236235 (SEQ ID NO: 9), wherein SEQ ID NO. 1 is a portion of genomic nucleic acid sequence of PLXNA4; (iii) SNP3 genotype C/C or C/A (or G/G or G/T in the complement) of SEQ ID NO: 1, wherein SNP3 identified by rs11761937 (SEQ ID NO: 10) on SEQ ID NO: 1, wherein the SEQ ID NO: 1 is a portion of genomic nucleic acid sequence of PLXNA4; and (iv) any combinations thereof, a therapeutically effective amount of a TS1 PLXNA4 inhibitory agent.

51. The method of claim 50, wherein the subject is determined to have two or more AD risk associated single nucleotide polymorphism (SNP) selected from: (i) SNP1 genotype A/A or A/C (or T/T or T/G in the complement) of SEQ ID NO: 1, wherein SNP1 is identified by rs277472 (SEQ ID NO: 8) on SEQ ID NO: 1, wherein SEQ ID NO. 1 is a portion of genomic nucleic acid sequence of plexin A4 (PLXNA4); (ii) SNP2 genotype T/T or T/C (or A/A or A/C in the complement) of SEQ ID NO: 1, wherein SNP2 is position 132,006,366 of SEQ ID NO: 1 identified by rs10236235 (SEQ ID NO: 9), wherein SEQ ID NO. 1 is a portion of genomic nucleic acid sequence of PLXNA4; (iii) SNP3 genotype C/C or C/A (or G/G or G/T in the complement) of SEQ ID NO: 1, wherein SNP3 identified by rs11761937 (SEQ ID NO: 10) on SEQ ID NO: 1, wherein the SEQ ID NO. 1 is a portion of genomic nucleic acid sequence of PLXNA4; and (iv) any combinations thereof.

52. The method of claim 50, wherein the subject is determined to have three AD risk associated single nucleotide polymorphism (SNP) selected from: (i) SNP1 genotype A/A or A/C (or T/T or T/G in the complement) of SEQ ID NO: 1, wherein SNP1 is identified by rs277472 (SEQ ID NO: 8) on SEQ ID NO: 1, wherein SEQ ID NO. 1 is a portion of genomic nucleic acid sequence of plexin A4 (PLXNA4); (ii) SNP2 genotype T/T or T/C (or A/A or A/C in the complement) of SEQ ID NO: 1, wherein SNP2 is position 132,006,366 of SEQ ID NO: 1 identified by rs10236235 (SEQ ID NO: 9), wherein SEQ ID NO. 1 is a portion of genomic nucleic acid sequence of PLXNA4; and (iii) SNP3 genotype C/C or C/A (or G/G or G/T in the complement) of SEQ ID NO: 1, wherein SNP3 identified by rs11761937 (SEQ ID NO: 10) on SEQ ID NO: 1, wherein the SEQ ID NO. 1 is a portion of genomic nucleic acid sequence of PLXNA4.

53. The method of claim 50, wherein the TS1 PLXNA4 inhibitory agent is selected from the group consisting of small molecules, nucleic acids, nucleic acid analogues, peptides, proteins, antibodies, antigen binding fragments of antibodies, and any combinations thereof.

54. The method of claim 50, wherein the TS1 PLXNA4 inhibitory agent is an oligonucleotide.

55. The method of claim 50, wherein the TS1 PLXNA4 inhibitory agent is an anti-miR, antagomir, antisense oligonucleotide, ribozyme, aptamer, siRNA, shRNA, or RNAi agent.

56. The method of claim 50, wherein the TS1 PLXNA4 inhibitory agent does not bind or inhibit TS2 PLXNA4 or TS3 PLXNA4.

57. The method of claim 50, further comprising a step of diagnosing the subject with AD or risk of AD prior to said administering.

58. The method of claim 50, further comprising assaying a biological sample from the subject before onset of said administering, wherein said assaying comprising measuring the absence of presence of a SNP selected from the group consisting of: (i) SNP1 genotype A/A or A/C (or T/T or T/G in the complement) of SEQ ID NO: 1, wherein SNP1 is identified by rs277472 (SEQ ID NO: 8) on SEQ ID NO: 1, wherein SEQ ID NO. 1 is a portion of genomic nucleic acid sequence of plexin A4 (PLXNA4); (ii) SNP2 genotype T/T or T/C (or A/A or A/C in the complement) of SEQ ID NO: 1, wherein SNP2 is position 132,006,366 of SEQ ID NO: 1 identified by rs10236235 (SEQ ID NO: 9), wherein SEQ ID NO. 1 is a portion of genomic nucleic acid sequence of PLXNA4; (iii) SNP3 genotype C/C or C/A (or G/G or G/T in the complement) of SEQ ID NO: 1, wherein SNP3 identified by rs11761937 (SEQ ID NO: 10) on SEQ ID NO: 1, wherein the SEQ ID NO. 1 is a portion of genomic nucleic acid sequence of PLXNA4; and (iv) any combinations thereof, wherein presence of one or more of SNP1-SNP3 is indicative of proceeding with said administering regimen.

59. The method of claim 58, wherein said assaying comprises: subjecting the biological sample from a subject to at least one genotyping assay that determines the genotypes of at least one (e.g., one, two, or three) loci, wherein said loci are selected from: (i) SNP1, wherein SNP1 is identified by rs277472 (SEQ ID NO: 8) on SEQ ID NO: 1, wherein SEQ ID NO. 1 is a portion of genomic nucleic acid sequence of plexin A4 (PLXNA4); (ii) SNP2, wherein SNP2 is position 132,006,366 of SEQ ID NO: 1 identified by rs10236235 (SEQ ID NO: 9), wherein SEQ ID NO. 1 is a portion of genomic nucleic acid sequence of PLXNA4; (iii) SNP3, wherein SNP3 identified by rs11761937 (SEQ ID NO: 10) on SEQ ID NO: 1, wherein the SEQ ID NO. 1 is a portion of genomic nucleic acid sequence of PLXNA4; and (iv) any combinations thereof.

60. The method of claim 58, wherein said assaying comprises:
a. contacting the biological sample with an allele specific detectable oligonucleotide specific for at least one of the following SNPs: (i) SNP1 genotype A/A or A/C (or T/T or T/G in the complement) of SEQ ID NO: 1, (ii) SNP2 genotype T/T or T/C (or A/A or A/C in the complement) of SEQ ID NO: 1, (iii) SNP3 genotype C/C or C/A (or G/G or G/T in the complement) of SEQ ID NO: 1, and (iv) any combinations thereof;
b. washing the sample to remove unbound oligonucleotide;
c. measuring the intensity of the signal from the bound, detectable bound detectable oligonucleotide;
d. comparing the measured intensity of the signal with a reference value, wherein an increased measured intensity relative to the reference value is indicative of presence of at least one of SNP1-SNP3.

61. The method of claim 50, further comprising assaying a biological sample from the subject before onset of said administering, wherein said assaying comprising measuring the expression or level of TS1 or TS3 PLXNA4, wherein an increased level of expression or amount of TS1 or TS3 PLXNA4, is indicative of proceeding with said administering regimen.

62. The method of claim 61, where said assaying comprises:
a. contacting a biological sample obtained from a subject with a detectable antibody specific for TS1 or TS3 PLXNA4 or detectable nucleic acid for TS1 or TS3 PLXNA4;
b. washing the sample to remove unbound antibody or unbound nucleic acid;
c. measuring the intensity of the signal from the bound, detectable antibody or bound detectable nucleic acid;
d. comparing the measured intensity of the signal with a reference value and if the measured intensity is increased relative to the reference value; and
e. identifying the subject as having an increased probability of having AD.

63. The method of claim 50, wherein the subject in need thereof has Alzheimer's disease.

64. An assay comprising:
a. subjecting a test sample from a subject to at least one genotyping assay that determines the genotypes of at least one (e.g., one, two, or three) loci, wherein said loci are selected from: (i) SNP1, wherein SNP1 is identified by rs277472 (SEQ ID NO: 8) on SEQ ID NO: 1, wherein SEQ ID NO. 1 is a portion of genomic nucleic acid sequence of plexin A4 (PLXNA4); (ii) SNP2, wherein SNP2 is position 132,006,366 of SEQ ID NO: 1 identified by rs10236235 (SEQ ID NO: 9), wherein SEQ ID NO. 1 is a portion of genomic nucleic acid sequence of PLXNA4; (iii) SNP3, wherein SNP3 identified by rs11761937 (SEQ ID NO: 10) on SEQ ID NO: 1, wherein the SEQ ID NO. 1 is a portion of genomic nucleic acid sequence of PLXNA4; and (iv) any combinations thereof; and
b. identifying the subject as having an increased probability of having AD when at least one of the following combinations of SNPs is determined to be present: (i) SNP1 genotype A/A or A/C (or T/T or T/G in the complement) of SEQ ID NO: 1, (ii) SNP2 genotype T/T or T/C (or A/A or A/C in the complement) of SEQ ID NO: 1, (iii) SNP3 genotype C/C or C/A (or G/G or G/T in the complement) of SEQ ID NO: 1, and (iv) any combinations thereof.

65. The assay of claim 64, wherein said loci of step (a) are further selected from: (i) SNP4, wherein SNP4 is identified by rs1593222 (SEQ ID NO: 11) of SEQ ID NO: 1, wherein the SEQ ID NO. 1 is a portion of genomic nucleic acid sequence of PLXNA4; (ii) SNP5, wherein SNP5 is identified by rs6959579 (SEQ ID NO: 12) of SEQ ID NO: 1, wherein the SEQ ID NO. 1 is a portion of genomic nucleic acid sequence of PLXNA4; (iii) SNP6, wherein SNP6 is identified by rs17166339 (SEQ ID NO: 13) of SEQ ID NO: 1, wherein the SEQ ID NO. 1 is a portion of genomic nucleic acid sequence of PLXNA4.

66. The assay of claim 64, further comprising selecting the subject for a treatment regimen, if the subject is identified as having or at risk for Alzheimer's disease.

67. The assay of claim 64, further comprising selecting the subject for administering a TS1 PLXNA4 inhibitory agent, if the subject is identified as having or at risk for Alzheimer's disease.

68. The assay of claim 64, wherein the biological sample is a serum sample.

The application's sequence listing, which the Patent Office published only in electronic form, follows.

SEQUENCE LISTING (14 sequences)

SEQ ID NO: 1 - DNA, 525357 bp, Homo sapiens
tcccaaactgcatttttattattttttaataaactttattctatattacaaataagttttttttgttctgaactgcaaaataggaatgccttatatttacatacacaggtatacaattaattataacaaaggtacagaagcttgcctttaccaagttacaactgggctccaatttaaatagcacaggtttcctttttaaaaactttttaatttttttttaatattttactaggatactcttctttaaaaatcaaaaccagaagaccctcttcttagagatctcatccacatacatttgaggctcattttaacactgttgtctaaagatatgctttgctttgttctaacaaagggtcaatgttcgaggtgggagctttagtttgaaacagaagtgggatggggctggaagggggtgactggaacagagataacctgccctacctccttcaacggcttctctatgtgactcaaagacccctgccggttccttaaaccacccttccatcctgtttctccccttctctagcatttgaagctcaactctgggtcctctggctgggccaaaacccctgcatcatccccacacgtcggctcgctgagccattgtctgttgtggtaccctggagttgctggttgctatggtaactcagcaggaccctgctggaagagatgggctggcccctacatgctaaagtggggaggagggcagtggcatccaatccttccttcccacctcagggcctggaggccttgttcctgctcaaagcagccaacacacgactaagcaaagaccgtatgtctcaaggacaccaggccaaggtagggagtggtgaggggagggctgtccattctaaaacacaaaatcgttggtttccgaatggaaacaagattctttgaggtaagctagcttttcattttaagaacagaaggtttaacaagtcaacaagctaactagaacgtcggggagggagaggaaaggaggacagacagatgagcacgtgtatcccatcttcgtcctgtgcctggattgcggctgacttctgtgcacgaaagtgttccttagtcctgtttggtgaagtggtctcggtttcttaagcgtcctttgggttgctctttaactgtatcctctgttttaaattctacttttgtaagggagcccttccaaaatgtgcttgagtcaaaagatcaaagatactaacaaaggaagttctaattccaaataaagaaattgctggaagaagagctgcatagaccaagtctacttgcttttgcaatcctggcggagggaaagcttgggtcttcccatgacccatccctcacagagcctccttaaagtttgaggaaagctgataagagatgtgtaggattcggcagtaccaggggcagcccagagagccaagcatagacatcaaagcgggtgggaatggaataaagtgaggctcccgcaacccaggattttcagcctacctgaatcacctcactacctctgccaatacaaacagaaagttctttttgtatatgaaggattttgtttcgttttgtttaactttgctttgctttctggtaggcaccagtctactcaaggaatttaatcgggatcctaatgagtatgtatttctcttacaaccaaaaaattctatatacttttaaaacttggatactccctctaataaaataattttatgggggagcaaaaatttgtagtaaaaaaaaaaaaactctctcttgcatgtctgaaacttttactgcagtggattactttccaaatgagaggagtggtcatttaggtttcctgtcaagagcatgccacccttagcaccatgaggagaggtttgcagagtgtcccagcctcattcgggagctgtgtcagtgttacctgaggctgtgtctcagctccccactctataaaataaggctcttgtttcctacatagagaatgcctgtagggtgaggtggcaggaggcggtaggagaaggactccatctgtcaaaagtgtggggaagcaccaggaatagcagcagccatgtgagatgccacccctagcattgtcctcatccagggaatgtcctgacccatttttttttttcaatgggggaggctcctcctgtcctctgaacctctcctcatccccttggaagtcataggttttgctcccactaaccgagtaatttggacttaacatccatagcagggctcccttcttactttcgaactattaagatatacaaacaaaaaccaaacaactccaaaatcccaaataaatggcccacagttttgttttgttttgttttttttaaaggaagaggctgagggttcaaggcctcccagtcacctgtcctgagagctggcaggaagaggggaagaggcccttgatgtagacgaggaccaggagggatggcggggggggatttggggcatggggagaagccagggcacggagctgcctggggtaggtcttctctgggggtcaggtgagctcctggaggtgactcagtcatggaaagaccccttgaaggccttgaagagctggctggggctgctcactgggctcactgttcctggaaggagcaggggaagttcccggagaggggcttctctgggccttgtgcctgcagagcaccttcctacctatgtctgtctgtctttccctcactgcttggctgtctgtgaggtgggaggtttgtccttgactgataacaatactggccctttgctcggttaagtatttgacttcacattactgtgtccccttggtcctgggaaagaagacagatggaaattgagcttttctttttaggtcacagagggtggtgctgagacctgggcccatcacagcatcgttcacggctctggaaacagtggtaaggattcttcttgcagtggaggtcatttgggaagtcattgcttgtggatcctcggatggggacccatagggccttggctagacgagggagctcctacagccaggaaggcagctttgggtggggtaggatggggctggggcagtcacagagggctgggctgagaggtctgagcagctcctgtactcaagtggataaatcgccctgggacagaggctatgtgtgcaggagagacacggtggaatgaggagggacagggaggatgctcgtggcaggaggagcacaggcagaagccagacatgcaacgggagacacggtaccagggacctggttgcatgggggaggtggagatgctgggccagtacatcaaccttcactgctggtgggcgcaggtagctgggcctgaggggaccaggtcagagacttttcctgtgggtaactcctgcttcttcctgggaacagtcctggacagtctgcctcaaactttgggatttatttaaaataacttctctttcacttgtagctcctcacaagcagccaagctcacttaccaggctgcgggtgcacaaggggtaggctttaggggctggctttgggtgcagggatcatgctgccattggaatgtaccttggcctgtgggacacttgggttatccactgttcccaaatttaaaaccatactgaaagaagaaggcaagaaaatattttcctgaggaagtaactggcatgatggccaccttcacttagtggcactatttgcagctaccaagaaatgtcagggtctctccttatggggaaggacaaagaatgggtaaaagctgcatctggggggacttgtggccaggagaaatgaccagcctaccactctgtttcttgtcttcctctacttattccttaaaatttaggaccccacaaagcccccttcttccctgctaccttaagcccttctctctccaacatgcaaaaaaaattcccacctaaactttgtcagtgattttgatggctcagtctggtaccattttccctgggagggtacgggataagttggaggggaaggtaaggaagatggccttttctctccttctgtctgctcatgactcaacataatggtgaccctacaaattaactttgcctcgagggaggccgtgaaggggcctccatcccacaggacaaagttggcccaattcctttctctgggagcccgcaagccacatggacagcccctggatgtttgctctgccagtggggtaaggaagatccctgggggagtttggaaaaaagatttgggtgggggatggggggcaaggacagctttttgacaatgttgcttgtctttgcttttaaataccatatcacacgtgcaccaagaatccaaacggaagaaatggaaaacaaacagcagaagataatttttataagcaagatgggctgtggctctggatacctggctcaaatttctcagtccccaagcaggccacggggactgcagcaaacagagcggcagaaacaacccacccaccaattaaagtcaaaccagccccaaacccctcccccaggagaaatggggacagccagaaaatttgtctgtccttgtctcctctttcttcctaacctttctatttctctgaggtgtttgaaatttttcttataacaaaaacatggaataaaataaagtcctgtaccgccaaagtaacaataacaataatcatcatccagtaaaaaataaaagcttcagcagaaccgtgataagtcttttttcttttttttttctgcttgtttgattttttctcttaactgtgcaaaaaaaaaaaaaaaaaatcaaaatgcactcactcatacacacgttcacacacgcagcttccatccagcaaatctgtgttaaatacgtttgtgtctctttcctccccaaccctttatatgtgcaaaaatattgtagtgaccgaggtacttcctcagaccgtctcccacatgtaccctttctggccttccaggtcctgtgactgacttcttgggagggaataaaatgatcaaggatagaaaagtcaagcttctccacctggtactgcacttgccaaaacctttggttatttattttttttcttcctcttccaatgcattgtttcccattttcctcttcccattaggttgctcatgtcttttccaccatctgtcctctgcgatgtcacatgatgccctgttccaaggtccaggcctcggcaggcgaccaccctgatttcctatggacaagcgccctctccttccacccaccagctctcagcatagaaagcaagtaagtgttgaaatgtcctgaagctgcaggatgaatggatgagcaaggggaaagagaaggggaacacttcaaaaatcctcctacaaaggacaagaaatccttttgagctttccgcctacacctggggcagacacacacacacacatacatgtgctcacacacatgtgcacatattcatatccaaaggggcaagtgttcttaaaagtaccggatgctccatggactttgctggaaatggtgtggtttcttccccaaggggggctcattctgagtgggtgacaaggaatgatgtctgatgtttggggagtgaaggcaagactgtgaatccttctcctcaacctcacctaagatgtttctccttgtctcccatagtggtgaacaactccagagcagaggtgccaacagagactcctgcttaggatgggagactgcaccagacagcacctaaggtctccttaggatgaaaggttcctagaaccctccattagaccatctctccccatagcctctgcttacctagtatcaatttctaggcacacatttgcctgcctggctaaaatcgtgcatctgtagatgtaagaacagatggggagatggatgccaaggccaaggtcatttgtatgtccctcttcttaattccagccaggcccatcagctcgactctttgtccctcccagatctgacaagctggaggctgaggttggctggcattttgggctgtctccgtgaggctttgcttaagtctgtttctttcaaggatgactgctgaagagatgaggaaggagaatgatgagagacagctgagatgttgatgaaatcattcccaaagaggtctggacagcccagtgacaaagtcatctgcatagcaatggcaccggattctgcagagggaacagggactaggctgttggccccagccgtctatggagttctcaggaaggatgatggggatggagccatggagatggctggaggtagaatctcctagatgcactctgcatttcacgttgacccttgatgaaggttgacaaaggagggtggagatagatgctttctcttgacagcactcagggctctggtagtggactagacctatgactatgattgtgactcatttgaatttgagggtaaatggaaaacaaattctgcttccagggtagatgcaactctctttccttttctccccctgtgttacatttctgctactaggattcagatgaaaaggtcaggagcatctccatggtggaatgtaattgctattctttctcctgcctggctttctactggcgggggagcaggcagggcaggcaggtccctctggagacctggaaaaggacaggaagcctctggacaccagcccagtgggggagaaggagcctcaaggagcacctcccagctgcccacacatgccctgctccagccacatgcaggaggtgtagcctttcttctcacagctgcaaagcgatcagaccactggctgaaccactggagatggaactgtgggaagggagagccaggtgatgtcttcccagtaaagataatactgaagtccttccttgcctcttccctaggccaaggctcagaccaaagcaggggctgccaaagtggaaggtgaagtagcagcacagaaatgtcccctgtccctggctcctcattcgttatttgcaccctgctgctgacatgcacagggtcaggagcacctgggagacagaggcctctctgacatcttctggtcagctcccttgccatgggcctggccattcttggactaactgagggtcagtggcttggtccaatcgtgttggcagagcaactggaagagaagagatccaggaaggagggagaaacggaaagaggcagagagaaagagagagaaacagcgctgctcaggggatgctgctgatgccagtcggaacttgcacttggtaaagatgataatctagactgaggcacggcttggtgtgtccccctccagggcggccctggaaggacggttctcagctgtctaagctcatgagggttatgacttgttctagtttgtaggccagtttctgcttcccacactggtcatcgtggtccagaggtccaaggatctgcggaagggccaagaacagggagattactcatttgtgtgtacaggtctgtgttctcaggaggcacaaagatggtgtggatgtggtcagaagcccgggaagccacaggcatgtgcaggggcacacaggacactgcggggtaggaggagacctggggagcatgggcaggaagttgtggcaggcatagcatgtgagcatcagcatggcagtgagcacaggatgccagcacacacagtcatgtctgaatgactgtgtgcattctactggctacaaaagatggtagacagagggcagaagctctgctgaaagtgcctgtgccgagatgctgcagttacctgcaggttagacagcagctagttccatatccgatggaaatgcgtagtgctcagcatggagccggaatgtgatttcatggatgttaagacatcccacccttcctcccgcagaaataaaaatccatcagctccttgaggccccaaattctacatttagaaagtcatttgttttcactttgcctgttaaaaaacaaatgtccctagaagagtaagactacaagctttcctggtcattaacacctaatggataatgtctaccaaagccttttctgaaggcaggcagttagcagaggacaatgacagccagcaaatgtggcccatgatgaaaaatatgctagaattttactcagactcaggagatgagggatggagtaaaggctctgccagtttctagcttggtgatctgaggccaaacaggtaacctgtctgaacactcaacgtcctcaactgttaatgtaggaatgactaatccacctccaggggagaggatgtcagataacatctgtgagcaccctcaacacaaggcctgccccccgagaggcactagacaattgggtggaacctactgatgttgtagtttgaggggcagggaaaagaagggagggcaaggagatgagaaggaggctcaagggaggcgcccagggctttggatttcatgacccagttaatgtttctttagttgtggaagcaggatagagctggccaagaactgtcatttgtacgcgccatcatttcatagatgggttatttaaacaccaaggtagacaggtgtacttgtagactaacagagaatcctttctgagaggagacggttggaatattacactggtgcacactatagcatccttattatcttgcattgccgcaggcaggggaaaactctgccccagaccaatactaacctgcagactggcatcagggtccctcccctaagggacccagcactggctctcccatgatgtaagggccacagaattaggctgttcatggcctgcaggactccaggccttgggcctgctgggtctgcttctttaactgggggttcctggactctccttaagtgatgaggatgggaggaaatagagaactcggggcacaagcttcagcttctcttactaccgtccactcagagaaggtggctatgctgctgctcagatgcagggaatttggattccaaggatggccagacccatggcaagagagctgactagaagcccaggaagacacaggcctcctcctacccagcagtgtcgtgtgtgcccctgcacatgcctgtgtcttcctgagcttcctgggctgatcagaagatgtctgaggggcctctctctcccagctgctcctgaccccatgcataggcaagaaaactcccaaagcaccatggcactggccagaaagaaggccttgtatatagtggcaatgaccccaggtgggattttccagtgagggaacaaaacagaaaacacattctatttgttctgttctgttctgttctgttctgttctgttctgttctgttctgttctgttctgttctgttctgttctgttctgttctgttctgctctgctctgctctgctctgctctattcttttctattctattctattctattctattctattctattctattctattctattctattctattctactccgttccattccattccattctattctattccattctgttttgactcacttctgtttcatttctagtctattctgtttctattctattctacaacataccatatcataccatacaatgccataccacatagccggcccataggagtgaggaggtgcctgtttaaagagagttagatcagagaaagatgtggaaaacataaaaaagaagaaatacaggagagaaaataagaattaaaaaagacaatataaaagaaacaggtacttatttacatatctaagaagcacagggatgaatgcagaatttatgggatggagggtttctagcatcccagcctttggatcacagccccaggtcctcagtggtggttcccccagcagaggtggatgtgtctgtggcgatgatctcttatacggaggcatgcagggttgtcttcattctcttcccccttccatcccaatgggcctggagcagggcaaagcttacctcctcgctgtatttgcccacataggagaagatctctgagagtgcactcatggtgttgaactcattcatgtgcatccgggactgctcagccaggtatgcgttcatgtcttggtcgctgatggctggcatcttccctatgtctgagtaatacctgtggagggatggaaatagggagaagctgaagtcgtgcatacggagtagaggagagatggatgctcccagcaccgtgtctggggccatgagctcagcttgcactgcaggtagtgggtacttgtgctgtggccacctggggaccactgtggtctctctctcatctgggttgctgggtccgaaccaggaagagccctctgcagctctggatgcaggaggcatagagggaagggatttggggagtggccaagacaggagaggaaccgagagccagagggtcccaactcgggcatcctctttgctctcagctaccacacagagaggtctagactgtcttgagtttctctaacgcccctcccacagacgcaagggatctcctccagcagggcccgaaggctcttccgagcggttgctcttctctgatgtcctccactctctgggggctaaatgggaggaggcagggctgaggctactcagggagagactggtagaaggcaatcagtcactgtcacttgcagctgtgcactgctgtcaactggttaagtagatgccagcatttacatttttaatttctgcaatttgacattttatgcaccaaacctcaactcccccaccagaggggggttgcgcagtttcttaatgaggaactgaaaggcctcagtgtccccaaagacagccacttctcaccctctcctatgtacttttgggcttgtggactgcataaaagagaagaggtaactgcaatgacaggagggcatcataaacctcaaggccttgtggtggcccagctcagcctagcccaatccagcccatgccaaatccctgtggctgccatgctggagaaagtaaacctgaaacctaggatcagaggggatgggggaggacagtctgcagggcagggactagggtgcatgaagcaaggcacctaggcaccaagtttaagaaaaggcactcactcttggggttgtgcaagtattggtgacaatgacagaccctgggagttctcagaacttgaatcttggtcagaggctccgggacagtctccttctgcaccccagccctgtgtctttcccagccctatccttcacttctccaaccaggaccctgtctgtcttgtgctgtttccctgacctctaactgttcccatcagtgcctaggaggtgggtgaagactggcagagatggttttcctgtgccatctcagtcatcagctcaagggcctgcaatggaatgacagttcaatttgcaccagagcatccctgggctagtgagggctgggatggcttccctgctttgagccacagtggtactgggattgcagatctgttgttctgcctggaaaatggggaggcagagggagggagatgacagctgtgctccctggcaagggaaggggctggtcagaggggactcccctggccacataccagacactttctcaactgttttgctgaactggtagcattttggctgggcaggagcctgagacaggcaacaaggccaagggcgtaataacatggcctttctcagagcagcctgggtgttcagacaggccgccctgcccccgtctcatttgtatttccatccttcacatcttcttccattccccgcccctcctccaccttcagaaccctcagggcccagtaccccttcctgtttcattttgctttctttgctccatccccagaagagcctgttctcttcgaggcctgtgacccgccccaaaacacatcctcaggtacctcaggacacagggctctgagtaatttaacgacattccaggtataaaattgcagcgagacttgattcattgtaaccatttctggaatgcaataaatgccattgttccattttatagtgggacaccagagatttcagtagtagctcccaaccttgccattcccaaggagatttgtgtcattgtccccttagggatcccatgtctaccaagcaagatatgtttgtcaagtaaagggctatcttcacaggctttatttgtaaaaagtgtgaacaaataacctcactcacttttggtaccatggccagcagccagccacgcaactctggtaactcagctgagttccaagcttccaccagacaggtatactctgtcacctgtacacaatcagagcctctgaccaggtgaaaaacccaggttcccatggaaaggacacaactgtcatcaaaagcaaagactcctgtaatttctctcaccagctgtggaacctttcacagtaggcaggtggctctgtcaggctttttgcaaacagtgccagggaccttcttgctgcctttatagtccccgaggtgtaaggaatcctcggttaggggccactgtgtctgcagtgaagagaccatcactagggaaaaaaacagaagcccagcattctgccttcacagtgtcttgcctcatggtagcacactaaaagccctgtccatttctccaaagagaatatctagaagtatatatgtgtgtgtgagaaagacagagagagctgctggggtggagggcagggagttgagagtagggtaggacagggctggggccctgaccatctcatctagaggtcctgggtgacgtgcctctcctgaacacatcatcctctctctcaggtcaggtccttgctgggtagctcctgtctctttcctgttccctttgcactggggaggctggatcaaatcagggcacgtctgtggccacatactattgacaggtgggccaactgcatgacctcatcttcagcaagttctaaatcagctgagctgaatggccaccgacagcccagtgtctgtgggtgtggggcttaagtcttgctgagagtctaccctgtttttgatcctaagcctgcctgctgctaagtggtcccatcttctctgcagggctttgttgatgctgtcttgacccctcctgctcccccactcccactccctagccagcaccttgtgcctgacgctgactcatgcggcactacctctgccgggtgaaccttgcttccttctcgctcctgttgtgccggccccagtgctgggctcctccactgggaagccttactgatcaggaagaacacaattaggctctgttaaggaactttaaacaagcattctcatctgctggctgtgcattgaggaagggaaaggggaacctgggcccctgtgcttgaacttgctcctgtgggcattctgccttcaggtgagcccatctccaggaagtccttcaggacccctccgagctgccccaggcctgacctgctaagaaggagctggtcccaccactggccttccctggttctttttgctgagttgctcacagcagggaggaggccagcacccctgaggtcctgacatcaggcctctgggagcagccataaagatcagcaccccacagagccgcatcctccactgttggccagtctgcagggtcctagtctgtggatttctatggggtagtgggatgccagcagaaatcctgggcccagagagtgacagtgcgtatctcacatctgcctttaggttagctctgtagtgattgggaagatggtctccaatgccctaaactctttggaaaggacacagcgttggcattcctccacacacctcgaggatgaagatgcaggagtgaaagatatttccagcctgatgctctgatattcccaatatgtacctttcaaggccctgaacaagtcttttcctctgtgaatcatgggagggtctctctgggcccagcagaacgaggccccacaccctgacttccccactatgatgcttgtggggcctgctgagcatctgtgtggcctccctgaccacaggagctgcaaagaaagggtcaagttcaatgcatttcaagtacccaactcactcatgatggataccattaatgtttgacccatgaattaatgaatatgttaatgaaatgtctatatctcacctctagactatatcttgctcccagggtaagctgtcaccattttatgtatttgactggatggtttccataggaggcatatttaaatatttaaaattcttaaccttttttcatgccgtgacacacatgatagatgacattcaaatgtgtggcacactctagtccaaacccctgtggcctgctgtgactccattctacttacttcttaaaagctgactgatggcaagtgagtgaggccaatgttgctgcaagaatgacctttcaactcttccaagttaaaatcagaggaaatcaatcactactaaagtatgcaaatgttttgctactggtaatgacacaaaaactacaactaatcacaacacgccacttcatggtgatgacactgttgtgttttgtctgtaaggtgaaggtagtagttaactgctaattggaaaccaagagactcttctccctttttccagattcggccataagcaaaagcttaaattcttggatgaggggaatgaatactgggaatccacagtggggctacaaaccaccattattacaaggtacttggaggcaggaatgggaggggaggatgggtggggagatggtgggagggaggacaggtaggaggatgggtgggaggagagatcggagaagagatggaaaaatagatggcaggacaggagtgagggcaggtgggaggatggatgggaggacaggcgggacgatgggttagaggatgggtaagagaatgagtgagaggagagaagggagggcaggtgggaggacggatgagaggatgagtatgaggatggtggaaggatgggcgcaaagatgggtgagaggacagataagaagactggtgggagactagatggaaggatgagtgggggatgggtgggaggacagatgaaaagatgagtgggagggtaaagaatttctagaagactcaacatactggcagaatcatctatgccattcaaccaagagttattgaggcttcctgaatttatatgcttccctttttcacctgctctgaagagaggaccagccagggtaagccctattttttagttgtgatggtgcagaaaaccttccccaaatacatgcagagcacactccacagcagtgagcctctaagtaaaaagtcctgggaggactgtctccatttgaccaacagcaggggagcaaattcagaagtgaccaagccgtggccaggtcactctaccatcatcctcaactgcaggctgcaaatttccttggaatggggaggcgggagatcaggtgtgctgtggtcccaggtgaggtctgccctgccggactttactttcccctccagggagccaggcaagctcggaggatacctcctctgggagtgggagtggacgtggacttgtccctccatcaccaagtgaagaagaactctgggcttgacctcagccctgtctgtgctgttttctcgatctatctgtctttgtaccccggtcccgaaaaggagaaaagatttggggcttcaagtaagtgaaagatgactttcttgaaagtgtcagtggttgctaagacacgagtgggataggaaatggaaaccatcaaatcactcctaaaaataacccaatggactgagtttacttgtgacctgcagcagctgcatggcacaaacctcattgagcaccaagcagaaaggagaccacttgctcagcccatgcatgagcctcagctctgactatgcagcctgttcctgggaagtgtcctttatgcagacactttataaatgttcccagcccttcacagccctggtttccccttccccgcctggggcactatcacaatgacactgtggcactcggatgaccaacagcccagctgctgcctcttccccctctccctgctgaagaattggctgtccacatgggaggggctggagggcctgctcctggcagctctattgttgggagagtgagccactgtctacatagcaggaggtgagagcctgtctaggtgactcagacataatcagacactaggacaaaagagttagtttccttttggacagctgaggtggcatgtccaccacctgcatcagtaggaaaggaggagagggtatcaaagagcagaggggagagggaaaaacaaaatcaaacccttttagtgacactaatgcactgaggtggccaggactctactccctcttagttatttcctttttataagggaaggcaattttcaagtataaagacagaggctgtctctatcataggcaaaatgataaagttcattttgtcaccaagtcaagaacaccttctggactcttttactcttcaaaaggcaccatatctgagcttccctctaggtttcctatatttaagctacttagaataaagagaaagtctaaatgcaggactgccatgtagagttgcgcaggttattcactgcacaaaggtacttggacaagaggatgagctgggggtgacaaagcccatcattcagcaaactacgcacttggtgtggggctacctcattctgtaggaaggggcatctttcttaaaccatacagaggcaccatatgggttggcagaggccctgtctgaaagtaacgcaaataagtaggaaggttatttgggagtcagctaagaggcttgggatctagtttcatcttggttctttaaatcatcttgggcagattacttagccattctgcatgtatatttcttcaccttcatggcataaaaggagcttatagttcctgtcctctccctagtacagggcttctgtgatgaataaataaagcttcagctggttgcttagttcaggtgcttggcgtatggagctgatgtggctcagacaaaccattaaccttctttaccatgagtcgcactgccctaggaagagcccagccctgcggctcatagggggaccttcagtcacgagagctctgcaggacactgggatttgatcacaacgctgcaagaaccagggcattaagagctcatgcaagagtcaagggatggggagagtgagaaactgttcagacagtgacaaaggcatccccactgaatgctgggaactgccagccagacggtagcagatgggtagaggcctccagccttttctgcagcaatgatgtagtttggccccttgaagtgttatgatgacagtttttatttattttttggggggtgggtggtgaagatcagagctgggagccgcatctcctttctgggcctagaagacatttcagccactaggctccagggcctgttatctagggaagctgagctaccatggcaacctctggccaagttttcctattctggtttcaggggacagcagcactgggacttgggggtgtgggtgttgcagtggcaggattaggctttgtgaatgactcatctggaaacacagctggtttttgatggggaggggaccttttgttgagggagctgctggctccagcaaggggccctgacttggctccgtggcccagcactcacctctccacccaattcttgtagctggggatgtccttggcatacagcagcttgttggagggcgagtccttgcccagccggtgctctgacgtggagcaagagtccatgaaggtctgagccaccacagagaggcaggcgtctgtgatgctgttcttatggatgtcaaacacaaactgcgggttcttgatcatgttgacccaaaacctcaggggcaggctgcgtggaaggaagaggcagatggtcaggaaagacggggcagtggggctgtggtgtgggtaggaggggtctctggagaaggagagaagcctggggaactaatagaacttaagagccttctctatgctgcggatgggatgtgccagggaagggaggtgaggcaggtctgcagggccccaatttaccttccaggaaactgaggactggcaaggctgaataattcatccagagatataatgttggtaggtacttgagaggacttgatacccagccttgatggcagggctcatcatcttccctttggtctaaaaggcagccatgatgtatgctataaagcggaatttctaactctctgtctgtctgctcctaagcctggtacaagagcatctagttggcaaactgtaaggaattgcttggaatctaggctttgtatctgactctctgccatctactgtatgacttggcagaagtcacacccttcctccctgcctgggcctctcagcctactcctactggggctgagaagtacagtgtagctgactgatttttcatttctaagctggcacgcttgaaaacccacattcacccacctcatgggccccatcgtattccctccttcccctccagttggcacctcctgcccaccaggaactgtgcttgcaactggggatacagtgatgaatgagacacatcctctgctctcaagaagcctgcattctggtgggttcatggaaaggcagacatgaaatcaactacatgccgggaggactgttggtgctaggaccagggatgtgtagggtccagcatgggaccaagggaagcatcaagcctacccagagggcagtgtccagaatgccttcacaaagggggcacttgatggtgggagttttaaaacttgtgtaagtctttcctttcctttctttctttttctttctttcaatggagttttgctctgtcacccaagcgggagtgcagtggggcgatctcagctcattgcaacctctgcctcctgggttcaagcgattcttctgcctcagcctcctgagtagctgggactacaagcagccatcaccacactcagctaatttttatatttttagtatagatggggtttcatcatgttggccaggctgatcttgaactcctgatctcagttgatctgcccacctctgcatcccaaagtgttgagaatacaaggcgtgagccactgtgcctggcctgtgtgtttcttagcagggtgaggcctggaggaaggtggtggaggatgggctgcagacaggaaatctgcattaacaaagacaaagagggaaaagtgtgccctgcagtctgctattgtaagcctgttgcttataatgtcccaatcctgggaccttctgccccttttggctgtagccatccctgcaggctataatcctacggcttccaaccagcctgcttggacgcaggtgggaaagagggctaggcaccatgcaagggattgcttacttctttcctctgctcccacctctgcctcctgccatttcccctgatgttttattgttttggtggttgttctcactgatggtaatagttagaatattcattatgtgtttggcttgctcgttagaacttaaattctttgaattacatcatttcaatagaaccagtacaatatttctatacttgctctatctcccagcagccagcatgtacaaataacaaatgctattaatacaggaaaacctaatgttcaagactgccaatcagtcgacaaggatctattaagttcctacaaagtgtgcagggcgggactcaggcaggcagcattgaggtctgaaaatgtttggcggtgtttgcttcatccctggaaatccctaataggaaataatgggatggcacccaggaaagctcagacagccacaacacccaggtgaaagtaggggtcattccagctgcccagccttcctgacagctgggctcagagccctgaatgcaggactcacgacttccagctaacgaaatctctgtttacatcttcctgttgttccacaagttacaccaaggatagggactctgggagtccacatttgctctgccggttgtttcttccctatgcttcccggtcctcaagccagttttgctgacaggcacagcaaacagggaagccacagcacccacctgaggttcccgcctaatgaaatattagcatattattaacattagtggtggcactaatctctggttgattgcagccactcaggctaaatgagcaggaggtttatttaaaagagaagaggtagggaactgtggaagaagggggtggggagagggtgggttacaccttgggccaggaataaaaaaataatcacttttccatcagagacaattaactccaagtcaatatgcagatcttaaaattcccagactgtgtcttcctcagcatagcaatagatcaagtcagggttgggggaaagtgtcctcagggttgggggaaactgtctactttctgggatttcctttgctcagacctgagtacttggaagagctggcatccaagaagatttggctccactccaaggacattatggcacccctggaggtggccttgccccagcaggagggatggggtgaaaacaaatggtttagataccattgtaggtgatattcttgcactgtgctactaaaagcaggtagaaatgtttagaaagacccaactttctccagctaggaccgagagaagttctgggcagagcatttttttttaaaaatttcctgaaggctgctaacattcaatggaggcagtaagtaggaagactcactaacagaagcagattggtaggctggggacatgccccactgaacagctcccagtagtcacgccacaaagtctagaagagttaaacgcatcttacctaaaggcaggtcctgggagatatcagacccagcacagctttaaaaggaggaaatcgcatcacaaagttttgctacactgagtgagcaatctagatttttgagtcttatttcagaaaggttggaagaaccccagaacgaaggtcttctctcactaggagttaatatgggagcaaaccccatgctttggttctgtggtctcaaccttggttcctacctggtttttcatattcagcagggatagtctcttctcccggtgaagaggatgaggagccagagtatactacattgaatacagttttggtaccaaagcctgacttctgccttcatctgtgcattgctttggggcccagggctaggtgccagggtgcttcgctgagccctaatgctttgcccatcctagcagttgttggtgcgggcaacaggcccacactgcctcagaagaatgatctggggaagaagatctggaaaagctacagggaggcagttctggaagcaatgggacaaaggataagccagctttgcctcaggtagagctctcaaccagagaccaccttggctctgcatctcatcaataattattgagacccagctttatgcaagcttccgtactaagtgctgaatactgatgtgcgatcttgaaatttcaacctgaaatacaaattactcacaagtgaaaggaaggatgatccatgttaaaaggagagaggggatcataggggagaacacctagagtgtcaattagtacttggagaatcctgttgtctcaaaggaagacatagtggttaagggcaggtctcttcaccacacagagcttggaaaagagaagagagcaattgcttgaatagaataggaatgccctttgttcacctggctggttcctaagtgtgtttcaaaactgcttgcaagtcactgttagacattgcccttctaagatctggttgcacacgacacatcctccatcttccatagcatttgtcccacaccagcagacttccttgcctctcaccctcatctgtcagttcattgagggcaggggccatgtctgattagccccgtgtctagcataatcacaggcacccaggaggtacttggatgggagagtgtcctggccgtgacatttggcatatttttcttgcttcttcagctggttcaataaatgtttgttaactgactaagtgataggaaagaaagatgcacagacagatttgactagagggaagtaagagagggagtgagcacaaaaatctaggaagagtggatggggaggaccagagaatgtgcctgctcagagtccctgctgatgaaaacaggctctggccagcccttctcctggaggcccagagtcccaccaccattaacttgaggctgggtgggctcagggctcccgatgtgccccctgccctcccttcactcaccaattgctcttccaggtatggcggacgtgcgggtcatgaatgccatgtttatcagcctgctcatccaggaagtcaaacatgtacttgatggccaggggcagggcagagccacggtgtgccgtgctgaagatggtctcaaagaggtcatccacaaacttctgcagtgtgccctggagaggcaggatacgtccagacacagctcgactcacgtagttctgaggatggcttttaaaacctgcctcacagacctaggcaggggaggatggtatacagcccaccctacttgggtaaaattgggtaagtccatgcattaaatcattttttcccatttcatctgtctctaacagctttaaatttcccctgcacatggaaaagagatataacactgatgactggacctacgtaaggcttcctctgccaacaacacggtttggttgaacaccctctggcggtgttattttagcacttttcacaaatgctaatgaacactcacttggtcagagcagacaaacacaatctgctggctttgtttgggcattactcacactggctaatgaacagtgactcacttggctctgcagagagcagagctgagcccagtctcaggagtgaaagactagcactgcaggcaagcaacgtccccagaaccaggattagaaatggtgccggaggccagacacggtggctcatgcctgtaatcccaacttctgggaggctgaggcggacggatcatttgaggccaggagtttaagaccagcctggccaacatggtgaaaccccacctctactaaaaatacaaaaaaaaaaaaaaaaaaaaattagccaggcgtggtggtgcatgcttgtagtttcagctacttgggaggcaggaggattgtttgaacctgggaggaggaggttgcagtgagcagagattgcaccactgcacttcagcctgggtgacagaacaagactctgtctcaaaaaaaaaaaaaaaaaaaaaaaagaaaagatatggtgcctgggaagtcgtgatggagccccgacttccccaacttgagattgtagatgataccacagagaagaaatcattcttttataaggcatggcagaagaatgtgaaaagaggcagttagagtctcagtatttcagaagggcatggagaaggggtagaaacaaatcttcagattgcatgccaacactgatgtattggcagggtttgcctggagttctggattgagaaggattctgaggttcggtacggggaatggtcagcagtgcctcctggggtgggtaatagagtgggcaccagcatgaatgctgggtactggctactctggcatttctgtgggctgatgaagtccctctccatagcctctgggctccctgcacccagttctcaagtctgataccttagtggccaggagtcgggtcaggtagatttcagacaccatcttgctcccccggtccccctccttctggtctccgtgctcgtggttcttcactaggtgccacatcttgactccactctccaggtcaggagtgatcataggtgtccgtgagcggaggctgtcggggctgcccgtgtaccggatcatgttttctgccaaggcaaggatcaccccccgacatatgtgaggccacacagccttagcccatcacttaccatgcatcccttgctccggcagaagccaacgactgtctgatcattcctgccattggtcggtgctgtcaccttgccttggtttggtgcattccctgaaactgggatgcctttctcaccacctccaggaaactatctgtggctaattctacccactcagatctcccccttcttcctgtactctgcatcgtgtcaacccttaattattcaatttgtaaaaatataagcctgtacttttttaatgcttttccttgtaagagttctcaagtcacgtctcaggatgtgttctgtgcagccaattaagtacatacttaagagcaggtagcctgtctccctcaataaccgctgatcggatgagtaatcactgggtaacctgctcaccttcgtctgtcctcccctctggcctgcgccaattattcctgtttatttgctgaaattcctgccagtgtttgtgaagtgttgtgaaatgagtactgagcaggaaaaagaaatggcggtcctactgtgtgcaggcactattctctgtattcatctattgattatctagaatgatcctgttcagtcggtagatttttcagtctcttcttctggtaaataaataaataaccaaggctcatagtggtcagatgactagccccaaagcacacagatagggcagaacagggcttcttctggcttctaccccacctccagcaccctctcctcaccactgcagagcctcgcacctggtctgtacctgcactccactgcaaaataacagtggctcttacaaatcatttagcctctgtgcacctgagttataatgtactaatctgcataatagggggaaataataattatttaattcactagattgttatgaacatgatgtgagataatagctatcacacagcctggaagacattcatgaaagttggctttacttcttttgctcgtggatgaaggtcttgcttatgcatcagagtgcccgactgaaaccagggtcctcttcccccacctggctctcttccccgatggtcagcctgtctgatgccccatctcccctctccaagagtctcctgccttctggctatgctgctgtcatgacaacagctgctcaggacacccaggcctccctaggacactcggtgggatcttaccatatttacttgctgaggtcctggagacggtggagttgttcactgcgttataggctgtcacctgcttggacactaatgccaccacggaaccatctggcacctacagggaaaaagcttctcagggcctaggcacagcagctctgccactccaggaaataaggacaaatcatgatgaacttggcactaaggggaaattggtgccttgctggagaactaggggactttggaggctgtcagctttccttggagcagaacaagacacagatctggatactgacaagtattctgttttgtggcttctcttggagtaacttctggcaagagctcctccctagcattctcaatcccagtgcttccctggaagatgacccagccttaaatgcccagaggaacttctcaggagagccttccctggggactctgcccatgccctgcagaaagtgtgcatgtcaggatgctatctccaaagaggtcagggtttcctggtttcttggctgggagacaccaatttcctctggatcactaagggaacatggagtgctggtgaggggcttggtgtctacccctgttattccagggcaatgatttccagggcaagggacttgtagttggctagctcctcccctttccacattcccctcacctggtagtgggccagtgtgttcagtcgcttccaatcattctcaatcttggtggtgatgtcttcatcctgcaagatcatccttgccccacttccttgtcgccactctgccaaaagagcggtggcgtttcagagaggccctatgacccctcttgtggggaagctgaggaccctgtgtaggtacctatgcagtgctagctcaagggtgtgtccattgcaagtgctagcacatgctcctgcgaaaatggagtgccaaagctctcaacgcagagaggccctgagttccagttctggttctaagcccaacaaactatgtgaccaaaatggggctaacatcacttatccacccttgcccatctgcttgctgtgaatggctacatctgtaaaaagtaggtgctcaaaaagtattggccaaacaaaagaggcacataataaaacactaagctttgacaaagcatgaggcaaatgcaaagtggcatagttgtggtagcgtgacttgtttggaagctcttagagctgatgaaatcaaggctgtaggctcagtcactgaacagccccagacctgttccaggggtgtatcctacagggtgaaactggcaggtgtgtcacccttgtcagggagattgggtcaaagagtgtggaaaaaatcagcaaaacccattctcacgcccatgaacatcccattccctgcaaagtttatgtaaatgatatcaacgttgtaatctatccaacacctaattgtttgatgttacaaggatatatttacatccccatattattctcacgggtccaaacacctacaatacatgggcttactgatggatcacacatggaaatgggaggctgtttctcatcaaccaaatccccaccaccatacttggtacaaatcacgtgtaggtggagaagtgcacattcttatctcgaaatgtacacacatgaaaatccatgtgcatgtcagacacacataaactcatgcagcacacacatgtatgagctcacgcatccacacataccattctcatggacatataccagaaaggaaaaacagcctcttaaattcaaatgcaacgtgtgttccagccaagaagccagacgtttggtttccaggcagcccagatcctgctcaatgcctctcagatgctgatacttctgaaatgtgcaaagaatgctgggctcgttcagagtgtcgttagttgctggattaagtggcctggcagtcactgcttgacccaccagggatttcttcctatgtctcacagagccacatgttcagattctcttcctcgtttccctcctgccaaggctggtccatgaccagccacatttgtggcagagagcaccaattcctccctgcattgtgtatttgttgtggtctgtgctgccaaccccatttcacagatggcatgccctttggaatagcagagatgctcctaaaatctaagccccttgcctccagtccctggggctccagtccctggggcttccctgctgcctgatttacagcttagcatcatgtcaggtggtcaaaggaatgaaagcatagggactacatgcttgttcactggagcaagaagtctctggggaccatccatcccttagtcctgtggatgtcacagctgggattgctcatggtgattatggtctggggtggttagactaataggcaaaggggaaaatgcctcactgaggtatctggtcactagcgtttttgcttgttattgtgttgtttttttcttcagtttttttgttttgttttttattttatggaggtatgcatgcatgcacttttgagtggttggagcaaaggaagaggaatctctccaagctggccagacagctgatgtgctgtgcagttggatgctggtggacaccagtctgggttggggagtatacggcagtgagcctcccccacttgcatggtgagtggcacctggttaagtcagaggctacataggggtggaggaacagctttggggcacaacaaaaaaaaggagccagcattctgctttcctcatatttagggtagggagagggatgcaatgaactcagctctggacactaagtcctctggctgggcccaagggagtctcctccactgaagtgaccatggggcttgctaggactagaaggagaaggtgccagtggagagacagccctctagcttagcaactgcaagggcactgcttgctgataaagaattgtagcacatctcaggagcatctgaatgaataaaccacatggcctggccaactaggcaatgacagttggtgactgattctgggctccagggcaggtcttccaccatgatgcacaattccccttagagctgtgcagtgcacagcctgggcggccatactcaacaaccctggctgagtcatgcccggaaattatgagaatgagagtccacctacctccatgcccctatccaaaaagactgggtagagcatggtcatgtctccttgggaattatctcaaaaagtcaggaatgttttcccaaaagccaatatggagagagggggctggaatcaaggagtacacttagcttgcttttagatctctcaagcctattattttgttatgtcctagacagaaaaaaattgctatgtgctttttttctgaaatatcagaaaggtgaaagaataagaagaaaggagaaagaagaagagaaggaagaagacgaagaggaaaaagaggagaagaggatgaagaggaagaagaaggaggaggaggaagaagaaggaggaggaggaggaagaagaaggaggaggaagaaggaggaggaggaggaagaagaaggaggaggaggaggaagaagaaggaggaggaggagaaaggaggaggaggaggagaaaggaggaggaggaggaggaaggaggaggaggaggaggaggaaggaggaggaggaggaagaagaaggaggaggaggaggagaaaggaggaggaggaggaagaagaaggaggaggaggaggagaaaggaggaggaggagaaaggaggaggaggagaaaggaggaggaggagaaaggaggaggaggagaaaggaggaggagaaaggaggagagggagagggagggggagaaggggaaggagaggaaggagaggaagaagaggaagaagaagaaagtagtagttgaaattgttgttttgtagcatctacaacttagtcctgatgaaagagagcccagactgacgggcagctggtgtgggcagctccatccctgaggctttcaggaaagaagcaaggatcacaagaagcctacccagctgaacccagaatggaggagagagggtggagtataactggcgggcagccccacattccctggcacagaataattcaagtaggctgacaaggaaagccactccttaatgtcactcttctctacccaaattccttacttttaccctgttggccagaacccactttcacttccatacttacctgccctccttcctttcctgaaaccccttcttcaggccagttatggtctctattttccctaggctcatcacggaatgtctcaagaagatcagatagtgggcatgggctcagctttctggagcgctcttgcacgacttcctgaccttctctcaatagaaatctgagccatagagctctactgagtaaagcaggggccaggaaaagccaaggtcaaagaccatcgcaggtggcttccctctagcccaggaacagtgccctctcctaagctgcatggctgggctcataaaatctcatccccaccccagaagtaaagatcccaaggtcaggttgagtcagctgaggatgagacagccctgccaccttagatatgaaggccagcaccctggtcccctcacggtgtgcacgactggctgaatcagcctcaggaggccctctgtgagggcggtatctaattttgtgctgtgttgcatattcagtgtgtgcttagttttaataacagtaatgaaaataaatagaacccaggtcccccagtgcttgatccagccctcttttcaccagatgggctccttctgtcttgcctataaaaaatgtcactaaaaatatctctcttttgagtctctaccttgctccgtaggaggtgaccacattaggacagccaagaggcaatgtcgtagctcagccaatggccagcatcctcccgtgaaggctgagcctcttgggcattttttgcctgcctgtggggcacagtgagaagctggaaaatacctcccaggcatcaaatgctatgagatgctgagctcagagagagctgtagcaaatcctggggcagagtgactcctcacaaacaccttctcctacaaaagaggacacctacagtcccatctcacaagatgcatctcctgcagtctctgtggtgagaatccaggtccaggaggtgttgcagctccacgctcactcattcatcaaagaacacttgccatgtgcccccagtgtgctgggcatggccaactgggcatgagaggtagttaaacagggaaacgggataaaacataagcccttgcccttgaagactccttgtgtggagaggctgtgcaagagcctgctggtcagggcaggggtgagacagggaagaggagctatggggagctggtgggaaagggctgcccaggttaaattgtgaaggatgagtaggcgttcactggctggccagggggacaagtgttctggtccaaaggtggcactcatgttgtagttctagggatcgatgagtctgagcaggagaaagttgagaggctggagaggtgtagggaggtcaggagctaagttaagaaagatccagcatgccatgccaaggtgtctggagctgagctgaggccagggagacagagcggggaggggataaggagaggagagcattattagaggggcaaagaggcatgagccctgtcgggatggccacctttgtccaaagcagaagtggcagcgaggacctaagtgaaggtagtggggcaggggtgtgggtttcagggatgctcagaagatggccaggtcatgcctgtagagtctctaggaaggggagaggtagggggaccctggcctgcctccaagtgtgtggagatccatgtaattggcagtgggaagctgaggcatagataggaaagagatcctccacaggccaacctggaaggagatgcttgcatggaggaccccactggcctggctcttgaagagtcccctacctaccagtaggtgccatgctgagaggcaaactctccccagggtgcacagcacctgatagttctggccctcacagtgtagacatgcaggtgggcccaagggcacccacacatgtacacacacatgtgcacatgcaccttttccaccaggctggggacccttcaggctttgcaataaccccacttccagtcttcctatcatcatctctcctcagacccatcccaggaagcttcaggaagggctgctgaagaaaggaaagggtggaaggagccactaaccaggctaggtagagccagcaaaatcgacctgcacagtccacgcaggaccaccttcatgaccacatgcctggacctccacccctgccaccttttcttaccttgggggcactgtgaacaggttctcactaggagcacacaccagcactgcacagggcccactccaccctccaaaccccgggctgagaaggaggctgtagggggagacaagattctatggctctgcacgcctgtcagcaggtgaaacccaaggaaacacctgacagggagccctgagaccttcaacacctggccacgctgaagtgctgggagcaggcaccggagaagagctgggagagccaagagaagatcagagtgtatctgctaaaaaggtcagaaaattcacctgggagcaggaggggtgacatctaaaaacgttctgttttttttttttttttaattattgtgacagcaagtgtgacacctggtgcttaaaagaagaagttcctgaatagaagtgcattatttgcactgaaggtactagatctttgtaaactgtaaagtgctgtgcactggtcagttgttgctatttggggatgcctagagagcgaaaggcaaacgcaggctgagccccgcttcctgatttaagagagacaagctagaacttagtagatattcttgaatgtggaacacagggctctggcatggctccagacagtgtggtgggtcaaagaagagtttagagggcaggtggtgtcagtgggaaggagggaaggtgaccctggcactcatatgcatggcaccaagagaaaattgctagctctgacctctctcgcagcagctctgcccggcagccggatgccctgctccaggcaccaagcacaaaggacagacacactcacaatccaatttgttacatttccaccttccagggagagagggaggtgaaataaaaaataaagaaaaatcccattatctttatctgtccttcccatcaggtgcagaggaaaatgcaaactggggagacagctgctgtgaactctttatatttcactcagaagatagtgtatctttttattgcctacaggaattacttatttgaaaaaatatatcctttcagcttgctcgacttgagccacaagacagagagagggtggtggagttctgggggctattgatagagcatttgcattaaactacaggaacctctggaggtcacggacagtggcagaggggagaggaaatgggtcgcagaggagactgcgtgtgaacggaatgggagttctctccacctccctgctgtgtaacctgggcccaggcactgtgagaactcagagaactgagctgcagattctccatctgtgcaggggaagagaatggcaccagtgatttcccttgaggagtgaagggaggaggaaaaaaagctccttagttcagatagaaaaatgtcctgtctctgctagtctgctaagaagtggggaacatctcctaggcaccttggcacccccaagcctggcacagagctggccacagggtaggatcttctcgtgtttgttgaagagtttagtgatgcaaacaggtacctaccctgcccagatacctgtgggtggaaagggacattttaaacctggttgtggggacagcctcacgtgtagcagggggagtgctacctgggcactgtgccttagagctctgcctcagtcccaactcctcccgctgtggtcgctgtccttccccagcttccaacacattgcagtgaaggtgggccctgcggtttctgggatagttaattctacgtgtcaacttggctgggccacagtacccagatatttggtcacacattattcgatatgtttctgtgagggtgtctttctatgaaattaacatttatatcaggatggattttgaataaagcagatttctctccataatgtaggtgggccccatccaatcagttgaagtcctgactggaacaaaagactgacctcccttgagaaagtgggaattctgccagcagacagccttcagacttgaactgcaatgttgcctcctccctgggtctccagcctgccagccaaccctgcagattttcgacttgccagcctccataatcgtatgaccacttctttaaaatgaatctctctctctctctgtttctggacatacacacacacacacacacacacacacacacacacacacacacacacagacgcacacacgcacacaacccttgtttctatttctttggagaatccttactaacgcggtttcccatcttggctccttaatgcctgcacaagtctggcgagggagtagagggagaggagtgggagagctcgtctgagctctgaggagcaatgaatagacatgtcaggagtgagcagttaggcaaagccaggggccacagtgatgatgacaggcaggagccaaaagccaagcaagagccgggagggttgggctggatttacttgggacaatgacggggtggtgcaaaatgtctttgcttcttgcggagctggcctgggatgggtgctcctgccgtgccaggggctgggcatcaggagagggaaggcagcctttgctggatgctctcagcagtgggagaagaaagcacagcgggtgcggggagaaagtcggggggcatgctgtgctgtcttggtcctgtccagcccatggggctgagtgagtgccaatgtgctatgcgtccctttggcataaatagtcacaccttacatttgtaaattgctcttaggctttcaaagcactttcacctacatgatgggaacaacttgccttgcttctctctccctgtgggggctgtgattgaatagtgtggaaaaagcatttgggtctctgaggaggccccatttttcttgcgatgcaatctagctttggtaagaagaagcctagagctttgtaagcagctctaaactctagatttaaaaggaaaaaagggaacttctcagaagagcacccatcatggttgagcagggagatgttgctgagcagctcagtgtgatgccccttcccagtgagaggggggccctgaggttcaaactgccccaggcctctctttgtttctctctgctatctgtccctggtgtggggatcttattcctccaagtgtggcccagcagcaaatgtgatggcagagggatcctctctgtttgtttgggtgcctggagcttgaacattcatggtgagcactggagacctgtttcctctgggaagcgggtagcctttctctggcttgtgcagcctctggctggggagaccagccaccctcaggcaggtccttgttgcagagctgctcttgggcttcctttcatcatggcgggtggcaggagcgactgtgcctgctttgtctgctgctgtttccactccagatagtctagaactctggcttcaggaggctttgcatcccataaaagacttgccttgctgggcttgcactcccaggctttttaagggagtgatttaagggactctcaggacaaagttcacggggctgccttctgtgagcccctccatgggaaatcacctattcttaagcacagaagcacacatctcttcatgcagctgcatgcaggtgctccttctgtgttctggcacaactttgcaatctcagcttccagcatgaaggagcctgctcctatcacagctccccctcttggccccactctgtctggactctcctcccacctgaattgcattaaggaccctgcaaagctgaaggtgccccctgctatatggcccacagatgaaacaaaggaacagtgggtgctagctggttccactaccaaactcaattctccctggaaaaacccattaaggagtattccactcaattgtttggacgtggggaacacaaaaatcctccttccaggaactgttctctctcccactgggccgtaacagtttcctcaccccatgagtctgtgggctcttcatggcagcaaatcaaatgcacacagacacacaggtctggtctggctctaagggcacacatgtgagcacacacccatacccctccccaccaccatcacacattggcttcctctgtgtcccagaaacagcatactcagagacacctccacagtggagggagacacatgctcaccgaatctccctccctcaatatccaagctcagagcacagggccaaacaccttcagccaagagccaagagagaggaaatggggttaaatgaagaagtgagaatttagaggagttactacaacttcctgatcctaagactctttagacatcagaattcagagggagtggggtgaggcagtgggaggcaatgaaaattccctctggattctagaaaatagcatagatgcccgtctgtcttggatggcttagccaaagccagcttagaggccagatggatggattagaggtgtctgaggggtcctcccaccactatgttaccaggaatctccagatacgagcacatacacacatcaatgcttctccctccatggccagcatcaacaaacaggcacagacagtatccttgtattatcctcataatcagtgacagcagccaatacttactgaatgtgtacaatggatcacacactgcattaaagacgcttttacatgcatgatctcactgaattcttactacaaggcaggcactatgattatctccatttatagctaggaaactaaggcatacacaggttacttgaccagggacacacagctaggacttgacggcaccaggactcaaatctagatgtgtttgatgctggccctcaaggctggaaccacctctcttccccactggcctcttcagatcctggggctccccatgaggatttccccaggatggcatcctatgaaatgcttatgcaaaccataactggctctaagtacaggtggccctaaccagcatgcccttgtttatagaggctgggagatatattcatgtaacagctaaaatgtcagacttctctccagcaggctttcaaatctcattttccctatactttctctccattctctatcactgacccagatccctcaagctgtaggtattcagcaaaaattataggcatggaactgagcagaagggaagagcctcaggcaacaacagaggcggtggcaggaccttgggccgcaggagctcagacaagcggactctgcccttaaatccccttctttccagatatgactccttcatttcccacccctctgctattcaaaggaccccagaggcatgtcctgccaggcagatcaccaacagactaccaagtggcccgtggacccctctctgcaaactgttcactgaccagctctggtcaattccaagcaggccaggaaggcaaccccatgggctcctgcgggggtccagccatgcctgactccctccagccagtgattattcccctcagatctctaccccagccctgcctctgctgacaggagaaggtgaggtgtgttcaggagcagccacaaggacagcccctgggtggacagcctactcacccagatccatatctgcagctttgggccggtgggagcaaggcacattcttgaagatggcatccagaatcttctccttgacctgagtgatggtgtcacagttgaggatctttactgggacctcggggctgttggcattgtctgggctgacacagctcaggacctgaaggaaaggtggggagaggaagcatatgaaatggggtagcaggaaaagctcctagatccccagcagcaccctgggattccgtcctgaatggctcatcctctccaggatgggctagggaggagtagggtggctccaggccatctgtgctcccaccaagcccactgccctttcctgtccaggcaagcaggacaatgccttggcttcaatgtccttgagggagtgcgagctgcacacttcactccctgtcagaacaaacttcattaaaatcctgatttttcaaagggacaatgcccaagcatgtggaagcagtgaggggaaatttgcaacagaacagacaccagtgcatgcatgcacacgtgctatctctctcacatgcatacaggaggcagtgtctcagcggcacacccagaccctcgcccacttctgaaaccccctgcccatccatgtttgtctgtctccttcttgtcactccttcttggacacacacacacagaactaataggaatctggcttctttctccaaatatttcacaagcttcaatttttatgaaggtttcattcacctgattagaggttggcaaatctataagacacttaatgtattctttaaaaataaaaagatgccctttaaagattgcaggttcaggacacctgagattctttcgtggccctgaatagggcccctgtgttgggggaagaggcgactgcatagttcagggcctccatttctccttttggaactagtaggaaaagttgaaactgcttcaccaaattatctttttattttttttcctttaaaaagttctgggcttttcctttaaaaagaacaaggcttttcttctcttgctgttctcacagtgggatctttctacatcgacggcaccgtgtgggctcctgggtggactggaggggaacggggtgggtgctgtgcgtactggagtaagtgagggcacaagatccaaggcagagaggctgggcatcctaggggtactgatgccaagtggccctccccttctgggctcccgaactctccctcgggccctgctgccagagagccctctgtgtgtctctctccttctcggaactttcactccctctgtgcccccataagcatttcccaattgtcccatctggtttgcagagccagacagcagtctctctcccactccacccccttcttgctgcatgtggtggcaatcagaaccctgggctctgggcacctgcctttcattagcaactagactgctatgagctcaaatgcgaacatgcttattccattaagaaggggaagaaaaaaaaacccctgaaatctataaaaccaaactttcacactcaaaatgccctaacctgaaaacaatggtggagagactgctgcctcaagcgctccatgtgtgcctcctcccagctctcccctccttctaagagtcttctggccccttccctctgctcagcagccaggcaaagcctgacccttgggctgttctggcagcccctgctgtcctgtcctctgggccctggtggggcagctcagccttcccaagacagcaacacagcttgccctgggcttcctcctctgagggacccatggggcagaggctgccacctaaacgtaatcccctggcatttctaattgccgcaggaattcagcgtggcctcatgagaacaactccatggtgcacttcagggcaggagttggcgttctaaagtggaagcagtggccccacagaaggacagagcccctggccactggccaagctagagctccacccacaggttcccttcctccatgctccttggctagtttgtggacaagctgcctcatgatttctctgccagggaagtgcctctcaaacgctaatgtgaatagaagcacttgggggctttgttgagatacaaaatctgatctaggaggtctgggatggggcctgagattctgcatttttccaggttcccaggcaactagctagtgctcccaggttccccggtgggcatctagcgctctagcaggcttccaggtgcgcatctagaactctagcaggctcccgggcgggcacctagcaccctggcaggctcccgggcgggcacctagcgctctggcaggctcccgggcgggcacctagcgctctggcaagctcccaggtgggcatttagtgctctgacaggctaccaggtaggcatctagcattgcctggttccaggctcccacgtgggtacccagtgctctagtgggcttctaggtaggcatcttgcactctgcacccagatgttgctgatgttggtactagggtgctcccactggcatggtccttggccacaccagtccaagctccagcatcaatccaataaatcactaaacccctagaggcacacctgactgcaaagtggtacactcgctttctccccaagcctcttagagcctctccgtggttctctctcctgcccaagacaaggctacttttagcaggtccatagcactctgggctcctccagccaccgccgagttccaggactcgtctgcacgccctgtgtgctgctgtcctgcacgatttcttgccatctgtccacaccctgagggggctgctcccctgcacatgtgcaaatactttccccaggcctgaaggtggctattaaagctccctgtggccgtttcttctccaggcaaaacaattgcagtttctttcctctttcctcactgctcctgtcctcaagtgttcccacctaaatggatactggtccctgaaccactccaatttcctcacattctctttaagttgcggcacctgaaatcagctcagtgcactaccagtactgtggcctctggaacaaaggatgttgcaatttggggacagaacattattacaactgattgtgttggattcaatattgggagggtgctgaggagacaggaaagaaagggagtggaacgggggagacagggtggaagacatttacgcagtacttctatctcattaagaaatccattcaggtctctatttttggaagggttttccccctcttttccattttaatcggagcctctctctctctccttccaagcagacggtaactgccagaaagcaggggcctcattcacaggctgctcctttgaatcttcataacggagccaatccccacaaatctgttcagacgtctactgggattcccggggcttttggaaaatgagagtgggataggtggatcatggtcacagccttcccagccagcagggatggctttgttcagaggtgggaactgtctccccagctagccacaggctctggaatttgccctcagctcagagcagttggaggggttgtctgagaatcacactccctcccagtactacaatgccccagcctgctgtggctccctctcccgaccgctgcgtttgaacttcagtctgttccccgtcctcctcgttcccttctgtctctcttgcctccattcttgggtgccacttgcatatcacccccaacactcagcttttatcttttcatactccctccttccaagtcctctctttctcagagaaaaagggctggttggagatcactgtgatctccaaaaaatcccgagagtgagctccctgggtttgaaaggacagtgagcagcgagtggacgcacggtgacagtggggagaggcaagcggggcctgcgtgaccaagcactagtgcatgagtatgacgcgggcttcactgcctgttcatcttgtcccatctgatcctctgcacaacttcactctgagcaactatgattatccccactttagtcggttctgttggtgttctcattttttcagataaagagacccaaattcagagagattaggaacctgccccaattcaccctgttggtcgaaggcagagccagggctcaaatccaggtctgtctgatcccaaaggccatgctcttgaatgctaagccttggtgcctcctagggtagctgtttttgtcaggtgagggagcctgaccttgatggaggggatccccacgttccttcaacaactgccttgcaccactaggccaccttggccttgcgttatacagcttgggtcacagttgtatttgaacttagagcagaaggcagtgggggcttcagagctatgagtaactctttctagcttcctttcctctctgtcccccactctctgcctgcacggacctcttctgtaaagcgttgactctaagctgggaggacagaagagttcacctgggtcaagggctttgaccctataactggtgtggtcagaaacccccagttcattggctgaagtgtcactcaaatgtgtctgagctactggtccccaaatccaaatgccctggtgaaacagaacagaggaagtctggggtgatggacacagcgggagcacctggctgggcccacacagcagacacacctggagaggcagctgttcagcctttcagccatctccactgctgagcagggctacccaggatggaagcccgcctgtcaaagccccaggggaaacagatgggtgggctcaccagggttttgtagtcaatctgctggcggatgagcttgtcctcgctcaaggagtagcgggcctcgcccgtgatggcgtcaatggggcccttctccatctgctgcttgatggcacagaacagggagaagaggggctccccagcacactcctggaggtgagaagaacgtcattaggaggagctcttggaacactggagtgtacccccagtccctgcttctccaaagggctgcttccatcccctgccaagtccctgcacctgcccccacctgcttttatactcagctcttcaatctccttctctccatctcctcatccttcaggctggcattcctcctggctctttggaccacagggtcttttcccattctacccatttctcctttcctactgccgcctctccagggctctttcttcctcccccgctcccctcccctcctgccctcctctctgctctccctccccacctcaccccgctctctcagaggccccatccaaaggcagaggtcagtcctgggtggcaagaactccttagaacataagttaataattggaagctgagcctcttccacctcccaggcgcatccttggcttatctgccgcaacatgcggcttctgcaccggccggggggccttatcagcctcagtaagtctggggctgggagagggaagaggaaaagcagagaaataatgggcaaattgtttttaacttcaaaggaggattcagctttagggaccatgcagggcctctcagggctcatctatcccttgcccggcagtaggaaactagccttgggaagactgtgtctttggagctatgatggactgcaggcctctgtcttcctagacagtccatgataaggatgaattccatttcttgtggggttataagagccaggcccagtaagggaggactcgggggtgtggagcgatccccagtcaggctgcagagaatgaacgaggcaaggccagaaatacgtccacatccaaccctaccttgaggaacttgtagaggaggaaagtaaaccaattggtcagcatcttctcagccactgactcagtcctgtcagcagtcaccgagggaaccaacggaacaagacaaagaaagaagcagctggtcagagcccgtgggctgggaagggcaagggaggaattgtgcattgatcttgctgcttctagcgtttaggccaaaccttgcgatcctaatgaatatgagagtttcatggactcctagacgcccccataatggtaagacaagcttttcctacaaagctggaagatgacattttgggcagcaggctgtgggtgggattttggctggaacgccttagagcaccgctgtccaattgcacgttctgtgatgatgaaaattttctctacctgtgccatctaatatggcaaccaccggccacacatagctactgagcacttaaaatgtggcagcatgtctgaggaactgacactgaacttgtatttatttttaactaatttagatttaaatagtcacatgtggctcatagctatcctattagatagtataaccttagagaactttataggctagttgtgttcttttgggtgaaaaaaaaaaatcccaaatcctggggaggtaccaatttggcagggaataggaataaaggtggcaggagaagggttccatgtcagaaggtcagatggccaaactgagtccacagcctcagctaaaggctcccagcattcgccgcagcataaagccatatacccagctcagcccaagccgtgttaaaactgtcctattgcggctgggcacggtggctcttgcctgtaatcccagcactttaggaggccaaggcaggcagatcatgaggtcaacagatcaagaccatcctggccaacatggtgaaaccccctctctactaaaaacacaaaaattagctgggcgtggtggcacgtgcctgtaaccccagctacttgggaggctgaggcaggagaatcgcttgaacccaggaggtggaggttgcagtgagccaagatcttgccactgcactccagcctggcgacagagtgagactccgtctcaaaaacaaacgaacaaagaaacaaacaagaaactgtcctatggcaaaagattccacatcctttggaacttcccttgggagcccttctagagtttcatttgcaatgacagaaagttcattcttgagtctaacttgcatctttcatgctacaacacaagcccatctactcttttactttggaagtgaagatgcagcagcagtgcagtcagcccaaggacattttcagttgcatccatttagagaaaacaaattacgttcaaacttgcactaagcatgcggccagctccagagagaaactagcccatccaggtatgtctggatagagtttaaagttgcagttgccagaaaatgctaataactaaaatcccaaggtagttgggaggctgccggcacaaaatgaagctggtaagagaaaagaagaaggaacattgaaaggaggtgggcagccgggggcaagaagaagaaaaggaaaggagggcagaaggaagcaagagcatccaggagaacaggaacggaaaacaaggggaggagacacagaggcagagcgagaccacgccagaaagttgtcggtgggagctctggcaggcagtggcaaccctagaattatgccagtgggtggctgcgtggtgaaagtaaaacaaaaatcaaaatgatctaccttgctgtttccaaagctgtctgctggctcttatatgcagcagacttttgcagctgtgcaggcaaatgcccactgctccaggaaaaaccctgaagtaaacacttctgaaagccaaatctatctgctggaccaagtgggagccactgaagctcagcctgagacccaaagaccaaagatggaagtctgggggacaggcagacagcaggcagacagcacatgagtggtctaggcagagggctggacataatgacatgacgtgggagttttctaacttcagatatgccaaggccaaaggtattggaataatggcctagaggagaaatggccttcgagtacacaaaaagttcaaacagaagcactggtagagtgagagagtttctaattcctataaggcgaaagtcataggataaggttatgtcttcacacaggacctttaaggtttcaacagtatcaagtttgaggcctccagggtgttgagtggtggactctgggcccatttacagcctacagcaggtgcgaggaaacacttgctgggctgtgctgggtgagacatcaccaaaggactttccttcagtgcttctcaaactttaatatggattgggataaactgggttcctcactaaaatgcaggttctgattcagcgggtctgggagggcctgaaattctgcatttatttatttattttttaatttttttttagcgacagggtcttgctctgttgcccaggctggagtgcagtggtgagatcatggctcactacagcctcaaactccagggcttaaaggatcctcctatcccagcctccagagtagctggaactttacaggtgtgcaccatcatgcatagctaatttttatattttattcttgtagagatgaggtctatgttgcctgctatgttgtccaggctggtcttgaactcctggcctcaagagatcctcctgccttggtctcccaaattgttgggatcacaggcatgagccactgcacctggcttgtgattctgcttttctaacaagctccagtgtgctcccgatgctgtcctctgccacctgatggcatgaggccacaggtcttctctcctagtccaactttggactcagataaggccagaggatggtctaagtgacctctgaagattccatgagaggagattgcagtagacagggtcaagattaagtagaagggcagagaaggaaaaatggagattcgacaaaggggcaagagaacaagagggtgagccaacaagtccatgcatccttgactcctgaggacagtggacaggttcttctaagggggcctgcaatgtagtcctggctctgggctagttagtgacttgaacttgggaacatggctgctctcctaggagctccacccgagtctccctgcaaggcacggtgagccaggtgcatggctaggctggagcagggtgccccagactgcaccctcacctcctgagcagcagcttagggtggttcttgctctccaggttcttgtcaatgaggtcggccagcagctgcttcagcacatcagtggcgtactccagcttgctctgcagcacggtcatgatgagtgaggccacgttgccacggtcgcgcatggagaagctacgctgggactcaagcgtgcggatgaaggacagcaggaacaccttgttgttgatgagctgggcgaagagcttcaggcctttctccacacgctcctgccggtagcccgggacctgcagagagacctaggagtcgtgatgccattggcaggttggggagctcagtgacctccccacgggatggctgtgcccatatccatgaccctctcatccaccaattaagccacagtccacctggctaatgctgtcaagcccttagcactgagttaagtatctgattaacctccatcgcagcctctagtttagagatgaatcaattgaagcacagagagagcatcacatggttagtaaatggcggggctaggatggcactcacttctgccggactccagagctcttccctgatggtgacgcagagttgatgagggcccctgtgtcatggcagagcacctcacagtccctgtggggaattccaggtgcccagggctgtcgtggtttacaccctgagaatccccatccctgagcctgggactaacctaatgcccacccctctccagccctaggggtgctgttgatacaccagtggcctcggagtcaggacatctgggttccacgtggattctgataccaccttgctgggtaactctgggtaagtctctttccttctctgggggcccaagtttatccacatgataaaaagggaagattgagcccaagagtctctaaagaacttcctaactctagcatttgctgttttcttagggactctctctaagaccctgctctatgcaggggaagaggaagaagatggtcttatctttctgcctccattgtctgttcattgggagatctctgcaagggtgtaccattcactcagcaaacacgagtcaatgactcaggtaggtgtggaaggcccacctctgagatgtccaggggtgtgcattgcaatcctgtcagtcacagctccaaactggaaacactcagatgtccagcaacaagagaacaggtggaggaattgtggtgtattccacccaatggataccacacagcaatgagaatgaatgacctattgctacacacaataacaggatgggtcctgcaaatgtactgaatgaaaaaagccagatgctaaagagggcatagtcttcatagaataccatttaaataaatattttaaaagcagataaaattaatcaatggttgtagagaaatgactgctctaggggatggctgtaactaaaagggggcaccccgggactcctgggggactggccatgttctgcttggtgctggcttgaggggtgctggcttgatgggcatgttcacttggggaaaagtcatcgagctgcacgctgacaatttgtgcgtgatttgtatgcatgcttctgttaaaccaaaagacgtacttaaaaagtcagctataggatctgcccccaagggggagcttctgagaacactgcagggtgtgtctcctgaagtggggcactggaggaggcagggagtgggagggacggcctggggaggtaacttcggagtcacgtcttgagggctctgtctccccaagggggtggataccacagttctttgagaaggagtgtcatgtatacagcagtaacgagcctggtttcagagtcggtcatgcttgggtttaattctgtcacagtcatttcctagggcccttagtgactcagtttcttcaccagcaaaatgaacataatgatagctaatactgatatagatctaagtccatactgccattctgtgtgctttagaaatactgacccacttaatgcacacagcaccaaaaaggtaggtttgttataatccccatgagggaccctgtgaggataaggagcttcacaaagccccaagacacagaagggtggaaggaggtcataaatcccggcacttggcacttctttctgccatctccagggaccatgatgtaaactgaaaggagagggggtatgaaaagctgatgcacatcccagctcctaaacagcagctacatcctcctgctctactcttgaggttttaaactgggaaaaatggagatggccagagaaagccttctttaaccaaagtcgcagagggtggcagaacattcatgatcctcattaccaataccctgtgttccaggctcagggcaaggcactggcaggaggccgggttcagtcagatccaggccctgtcctgagaagttcaaccaggaggccagccccagagagccctgagatcccttccatagcggagctctgtgagccagccctgcaccttgcacagaagggctgtcattgaaacctccaactagcccgtcatcagtagctcctatgggtctggaagctgtaggaaacgtgtgtgtttccaaatcaggtccattttcatttctctcactgtggtgctggtccttggagggccagttctcaggagacaaatgggaacagctagagataaacaggctacagcaggccacagcccctgctggcaaacccctcacctccggaggtgggactagcctctgctttcttcgtgcctgcctcccccagttctccccaccactgggggctgatgagggaaggacaactttaccttgccatcagcccgggcctcaatctgcccatttatctgtcttccaactctgtgaccacccccatcacatacatgccgctgtccttcaaattactcagaagagcagttctatgacttgttctaataatagtagataatgtcatttcttgggcatccaccatgtgcaatgcacagtgcctggcacattacacacattgtttcaatgaggccttctaatgatcttgcaaaactgagttaacaatctctcagagaagctattgcagctattccaaggcagcctatctcatgacaggcagtgctggattatgaaacccaaacttgtttggctcccaagtgcccgttcgtcctccccatctttcaccatatctagccctacccctgggcttgagagttgtctgaaagccaactcggatgtctctctaaagccttcccgtgcagggcctcccaccagctcagactggccggctaagggagggcagtcaccagaaggtttagcactatggcatttagagaggtggaagaggacatgggttggctagatagcacacttggtgtgaggatccactctgggattcttgcgaggctgccccttctctgtgtgcaaaatgcatatgcctcctgggaagcaggtctggggccctgggaaggaagattttagcaaagccacctacagtgaaatagcatcctattcagcagcatgggtcttagaagcagagagaccacagtgactcgtaggtggaggaaaactccatcacctctgggctctattgcctcgtctgtaaaatgagaatatgagtgtctatgtcataatgttttatgaacattaaataagataatgtatgtaaagtgcttggcatgcaccgtgcacacttaaacggcaacagttttattacctgcctttcagactccctggactgctttccagggatccctttcctccaagagtttcccagacatctagtgcatcagggtggtgttttggggtgtgggaggtaggaattttctccccactttatgaaggaaggagatggaagtgaagtgtcttggtcaggagtgtccaaaacagttcctcactgttgcctgccaccctccccagcccaagcaaatgctactctgaaacaagactttctttattcaccagatggttctctaatttagttgaagtctgtgagtataaaactggatagtaaattttaattgtaacccaataggttagagtttaggagccaatgatagactgaaattgggagattgactgctctgtgttttaaaaggttggtacatgaccagtgcctgggaagcacctttcttgaaggcctggacttaacccagagagccccacttgagggggctgggtgacctcccctccaggacagcctgaagcaagaggacacctccttcttcacacttccagaggtaagcaggaaccccagtggctgaaagggctgggaaacactggtttggattaatcaatggcttgtttccatacttagaacaccaagggggagaaactactccaggggcaagaaggggttggaaaaaaagcaaataagaaaaacagtgatccacacacaatccctcgatttcacatagaaggctggatctcacatagcccccggctaatgcgggccagtaaaagttctcagaaaatccaacttaaacatatgtaactaacctgcacattgtgcacatgtaccctaaaacttaaagtataataataataataataataataaagttacatctttaaaggaaacctacttagatttggaattttgaactcatgaagaaaggagaataactttatatactcatcctcattgcattcttatttaaattattctccatcccatccacagagtaatatgggaatgttcagacataatttcccgtcctacaacccccgtttccaccttaattcagccaaacacacagatattcatttattcaatcatttaccacttcccacatgcccattatgtgccaggcactctactctgctggaagttagaactacaaagataaataaggtacatgcacagtctacacatccaatcatacacacacacgtgcacacaatggtcttatcttcttgtccctcttgtgtctcactttaaacaggaatttgtatactctccagggccctaagagaatcctggtaatttgaagcaaacgaaggtgaggctggagaaaaataaaaggaagagaaaaatgagtaggactgggggaggagcaaagaccaggagcaagatcaaggaaatgggtagacaaaagtatcaggatacacgttatgtttttatttatgcacgggctacatctacacatgcatgcacacatacacgcacacaaacacacatatagacagagagaaaaggtgccttgtcgatgaggacatagagaccgtcacctccaacttatgaaagtgtctcttggtatctcttagctgaggagccaaagggagcctcctccagatagaaaagcccatgccctcaatatagaaacacacacaagcctatgcttcatgcaacaagcaagtatggagaaacgtgtgtgccacgaatgcccctctggacttctcacgtttgctacagaggtgcacagcctactacattcccttggacagcccacttagacattccctcaggtgtcggtacctgcaaacccacacagctcccgagtgatgggtctgtttttattttatggacaatgtaaatcttggaattaatcttagtttgcattgttgctttggctgtagatttttgatccatccaagctgtaaggcaggtcactgacatagctccccagaagtccagcacagaggcctgttgttggaagcaaagacactgaagtctaaatgcctgagctcaaatcttcctttggccgccaccagctgtgtggtcccaggcaaccactgaactctggccccttagttttgtcacctgtataatgggcttacttacttcagaggcttcttgggaggtgaaatgaatgaaagcatgcaaagggcttaaactgtgctaagatgttagtaatagtcaactcatagtgattattcctcaggattattattctgtcctggtcttttctcatttatatttttcacttttctctggtatttatctctgtaagccattccaaagccctttcaggacaaagtataatatgaatagacacctaagccagataccatgctagacagtaagtgggataaagtgttcaaaagatgaggtccctgctggtagaagagagggttatgatttctcattcacatttccaccccacttcccaacacatcgtttaccttttccaattaaacactaagtggtaaatcccatatatattgagtaccaactacgtgagtcaaatcccctacttcatggacccttaaccaaaggtccctgaggttccccaatgtatttgccgtgtttcttgtttctgtgcatatgtagttttttctggggagagggtcatcaactacttccattcaattctgaaagggctccatgatcctccaagacctgaagccctactcacatctctgctccaaggttccctggcttggccccacctcttccagagggatggactggtgctgacaatctgggggaccttgggcaagttgtgtcccctccctggccttagttttctcacctccgaaagaaggggctggacttgaagattgccaacacgctcccctgctctaatgccaggatggagcactgcttctcacctcaaggtcccggaggacagggtggtcttcaattcctgggaacagcacccgcatggtgtaagttctatagtccaggaacggaatcccggctccatccaggtcactggtcagctcatggatgtccgtctgcagctcggcaaaggctggcacgaagagaagcctgtgagatggctggatggggaggctccaggagtcacctccatctcagaatgctcagaacccttacccaagcccctaggagacatgagcaatggaccacgatgggcgggaataactggagaggctatgtttacatagctgggattgggatgaatgaatggcattagcatgggagaaagatgtagtgcaagaaaccttgtcttggggctaaaacctttccaaagtgtgatgatgtggggtggtggctgaggctgtccacagatctgtgctgctgcttggccaggagagactccccatctgaagatgaagggctttggtttgcaaaatatgctggggagggggatgtagagggatgggtaagagaagggagaggtgccatgaggaagagtccattcctgatgctgtgttttagaatagatttccttataagatgttaagaaaaactgataaaggaaaacaagtttaaagacacaagtctggaccatgcagctcatcagagccatcaaacttccaaatggggcagagatggaggctcagccacactaatatagtccttctgtataaataggcaaggtatttctttgtccttccttcctcaaggtgatgctacttgatggtgaattatgacctgcatgtgggcactgctgtgtgtggcggcagctcaggcctccagatgaacagagtggcaagaacccccaggaaagtgagcatgcagtagagcctcaggctgttacatagcaccaaagctgtcaccatattccgttctggaaacatcctcccccagggccaccctctgccacaggggtactcaggggtgaggcacccagcccttccctgctccgcctttctctttggtgtgtgcacacacacatatacgtgcatgcatgcacatggaccaccaggatggattaacacatgctggcaaagaagaacagccagtgggcattaactattaaaaaatatttctttctatttacataatctcaaaaatagggagaaaatattttgtgaactcagaagggatgaacaagcccaatgtggctctagagcctcaaaaagcaagcccagcgcccagtgagctgtgatgatcacagaaacacaatgcagccaccctaggaactgtctgcagggaccccagtcctgcccttgcccatgagttgggtggagctccacccagcagagcagacttcaggccctcaaattttggctttctgtgccaggagaatcccaagactgcttgtttgagagagccaaggggatgccacctggagagtcctctgcagcctctcctgctgctcctctctccctgcacccctgcacctctacactggccacacagacacaggggttcctgatatgtaggctgatttcaacagtagagaacccaaatgcatccaagtggagcctgcaccaatgtgtgtgtgcatgtgtttttggcatgtactgtcaccaaaagccctggggaacattcatgtgtgtcctgagtgaggaacatgggtgtgtatgcttataagagagtgtgggaacatgtgcatgagcataggtgtgggtgcatgggcacttgtctgagtgtgtatgtcagggagtgtatgtgagtgtgtgagtgtgacagtgtgtgagcatgtcagggagtgtgtgagtatgacagtgtgtgagcatgtcagggagtgtgtatgactgcatgtgtgtgtgtatgtcagtgagtgtgtaggcatgtgcaagtgtgaatgtcagtgtgtatgcatgtgtgaatgtgagtgcatggatgtgaatgaatgtatgtcaatgagtgtgtatgtgtgtgaatgtgagtgcctgcgtgggtgtgagtgcatgagtgtgtgtgtatgcttgtcagtgtgagtgtgcatatgtgtgttggtgtgtatgcaagtacgaatgtgagtgcatgtgtatgtctgtgtgtatgcatgtgtgagtgcatgcgtctatgtgtgcacgcatgtgtgaatgtgagtgcatgagtatgtgggcatgtgtgtgcacgcctgcaagttgagtgcgtgagtgtatgagtgtgcatgcatgtgtgcatgtgagtgcatgtgtatgcatgtgcaagtgtgagtgtgtaagtatatgtcagtgtgtgtgtacgaatgtgagtacatgagcgtgtgagcacatgagtgtatgtcagtgagtgtatgtatgtgaaagcatgagtgtgtgagcatgtcactatgtgtgggcatgtatgtgtgagtgcacgagtgagtgtatgtgagtgtgcatgcatgtgtgcatgtgagtgtatgtgtgagtccatgagtgtatgtcagtgagggtgtgtgggcctgtgtgggagtgtttgtaaatacacgggtatgtttatatatcagaagcttaggcccatgaagggcccagctgggtgtcttctgagtttgtgtagaggacgtcctggcttgctgtgaagtcttcaaggagaccccttggcttgggccagtgcagccctgtaaacgttcagtggctggctctgggcaagctgcaaagtgcctctgtggctagtctgacaagtcctttgctgtaagaccccttcttcctacgtgcacagcatagctcgcccctaaagtctgaagccaaggtttcctcctggggcctcagctgacaatcctgggtgggagctcccatcggctgctccctcccagttggggtgctcggcccacagggagcagaaggagggtgttggctttttatcagtctgcagctttcctttaagtcaccaagcgcctccaacattcaaagctgcgtgcctgccacacataaaagagattctaatcactacacctaattagaggaaagagtacattgcggagaaaaaaattaagcagcgtaaatataataaaaggcagtaattaacagtcccacaaggcggatgctgtgttgacagctgaaggatgtagagaggggatggaatggatccacttccccatcaaaaagagccgtggctgccctggtgggaatcggtgtgaagtgagagccccaggtatggggccggatttactccatgtacaaatctacagcaaagaaccagctcagatcctcccaggatgagtcacaaaatgatatcctgggggttacaagagtctgactcctaaatttccttcttggatttagtgcagctgatttcactttatggtggtgtttgtaatttttttaatacaagctttgaaacacccttccttctaaatcacagatcagccctacagccttaccttcctgctagaggaagaaagctggagattgctgaaatgcgtcatgttaagacacccccagacctcccctcgagtagagtgcaaaacccactcaaccaggattccaggtatggaggctgctctagtggggtgaaggtgctctagtggggtgaaggtgacaatcctgggtgggagctcccctcggctgccccctcccagttggggtgctcggcccacagggagcagaaggagggagttggctttttatcagtctgcagctttcctttaagtcaccaagcgcctccaacattcaaagctgtgtgcctgccacacataaaagagattctaatcactacaccttcaaggagagggcaaggagaccttggcctctctggtgttgccagggtggggcctgcttgggtatgggtgtggtctgggacacaggcatagggactatagagtgagaggctttgcaggtatgcaggtaggatgcacagcctccagcattgcccacagctgcctggcctgcttgcttgtaaatgaaacacatacacatacacatacacacacacacacacacttgtaaatgaaacacatacacacacacacacacacacacacacagcctccagcactgcccacagctgcctgggctgcttgcttgtaaatgaaacacatacacatacacatatatacacacacacacacacacacacacacacagcctccagcactgcccacagctgcctggcctgcttgcttgtaaatgaaacacatacgcatacacacacgtgcacacacacacagcctccagcactgcccacagctgcctggcctgcttgcttgtaaatgaaacacatacacatatacaggcgcgcgcgcacacacacacacacacacacacacggcctccagcactgctcacagctgcctggcctgcttgcttgtaaatgacacacatacacatacacgtgcgtgctcacacacgtgcgtgctcacacacacacacacacagcctccagcactgctcacagctgcctggcctgcttgcttgtaaatgaaacacatacacatacacacacacacgcgcacacagcctccagcactgctcacagttgcctggcctgcttgcttgtaaatggaacacatacacatacatacacacacatgcacacgcacacacagagcctccagcactgcccactgctgcccggcctgcttgcttgtacatgaaacatatacacatacacagatgcgcacgcacacagacacatatacagcctccagcactgctcactgctgcccggcctgcttgcttgtatatgaaacatatatacatacagatgtgcacacacacacatgcacacacacacattcgcacagacacacacaccgccagcctccagcactgcccactgctgcccagcctgcttgtttgtatatgaaacatatgcatacacatacacagatgtgcatgcacacacatatgcacacacgcacacacacatggcctccagcatggggccactcagtaccttccttgcactccagggccacacgggactccaggttgtccatctgcatctgcagccgcttcagcgtgaggtcactttcgcgggacttgcgtttataggcaatgagcacggccacgatgaaaatgatgaggaggccgccagccactgcgatgctgacgatggcgggcaggctgagcgggctgtccggggcaatgtacaccatccccggggagtactccatgccaccgacacgggcctgggggcacacagggcaagagggagctgggtgtggggacgcagcagctttggcaacagtcccaagttacccatgaactagtgaccagggcaggatgacggaaaggagaccaatcactggtgtcaaaatagacaagagggcatggggggctgggagcggggacaggcacagcttaacagagctcacccccaactggaaaaacctcacctcctcttattcaggagcgagttttgtcatcttcataagaaaacagcacacaactgggacctaaacacagtctgccacaaatgactggctcccctaagatttatgcccaatctaagggtggacaactgaagcacagaacatgatattaagatattacggaattccctgggccagcaacagccttctccttgaaggctttgtttgttgcaggtgatttagcaactatttaatgctgttttgcattttccttattgttgcaccagccagtgtggaaagaatgacaatacagaagagagaagctcaaaagtgaacatgaagaaagaacttggggtgtggggtagctacaggaaaagttctttgtgggacagaatcccctcttggaaagccttggtggcctgagctcacatctgcatccctactgcccgctccatccaggatggggttctgccagcctcaccatcactttgtgcctgccgatgaggttgggggactcgcagagcagctggacatctgacacggtcacggtgcacggcttctccccaaccagcacagtgtagttcagcttcacgttgcccccagccacaggcgggatcaggttcttgccctgtacaaatgggaaagcaccagttcccaccccagagtgaggaccacagctaccagctggctctcatgtcctcccacctggaggtcccatcccgctggtgagctggtgaagaagccacctttggtaataagtgcaaaaaatattcatggcatgactaccaccattgcctcttcctcccagtggctaatcagttatcaaagtactcctttcagcttatcccaaatgcagcctcagaatccttctcaatgcagagttggagtcagtcactaccaattgattcaaattgtcataagctttaattaacctgtaacccatgttccaaaggaagccctatgctgtggttcgcacaaggctgcctcagaggaagcagtgagcctgacctgccagtacttggactttcaggacaataaaagcttgagagtcaaatagccaaggtggatctgccttccctgggtagaaccggcccctaaagagagttttcttcccagtacagactcagagagaacatttatcacactctgggctacactgcaacctctgcaagagatgctggttgagaaatgtggcaggagtctgtgacttgaacacccccttccatgcagcagccccttcttttcccacccccgcctcccaccaccctcactccacctttaggatgatgggcgtgccaggcttgagctccaggattcctgagggaccaaaggcctcaaacaccgggttgggatagtaggtgaagttggtcttgttgaggatgagcagggactggacgttgtccaggatgaagccaaactcctcgggcctctcggtcaggtctgactggtggtcaggacccagagcgagggcgggcgcctgacaggtcatctcagtagcgttcagaacctcacagatctgtgggaggagccacagagtggagtctatgcagtatctccacatacccacagccccagtgcacatagtgggcctccctggatgtcatcgggatagcaaggggttgacaagaggattagagatgagtcagggccacacaattgggcactcaaggaataggctctatagcttgcacccagctccggttttgcccatagtgggtgtggcaatggctaggattggaagaatgcaagagtaaaggtataaaacccagggaaccccaaaagtaattactcctccatgtctataccccaagaagtaaaaatgcccttatgtcttcccccctattccactatcctagtattcaagggtgtcaggctgtgggttatcagtgtatgggcagggagttacctcagtacttgggaagacccacaccctttggggaagcaacgtgttgcatgggcagcctccatgaaccccatcagccctacactcacattgatgtgctccttccctccatgcttggcacggatctgggggttctgtatgaggtccaggtgggtcccccatacggcgatgggtgtgtttccactgagcaggaagaaagaaggagatgtgtaaatgataagttcaggaagagcaatggcactctacaatgatgactgagctatgacaataaggacagtgataactaggcagcagggtaatgttcatggggacaaggatgacaagctgactgcatagtaataaggatgagtatctcggcagccaaggggagggcagtaatgaccagatgtccgtggccatcctttgctgagtttgtttggagtatggacccccgtggaggcccagtcaacagcacagcccccttggctctccaaggcctcttgatttgtgccagctgcttctctgcaaccccttggtgtctcttcctccatccttcccctggtcctcaccaatcttgggactttttaaacattagctttggcctcatgaaagcctcgctccagattgtccccaccacatcctgcaggggctgagcacagtctgctcccccagggcaatcgttctataattttctatcttggaggcttcgatcaggctgagatctgggaaaggcagagggtccatgaatgcaaatgtgaatgcaagtgcgaaatgcttttggactcgggtctcctgtaccctggggtggcacaggaccactgacagggaggacacaggactgctgagagggagggcacaggactgctgacagggagggcctaggagcttcatcttgtgtaacctttcaaaagaaacctggatgccagtgcctatccttagggcagctgagaagtgggcataaaggggtgggcagtactgtagtggactgtgtcctccaggggggctactcaaagaaaaatgagaaatagcctgatccccaatcaaaggagcatcttcgagaagaatcctgctatctaaaacaggctttagcaagttagttagctagaagttgatgagtaaagaatccttgacacacacacccacattcatttccacccatctatccatctgcctgtctttatattgccagttgcttctccctctctccttgctcacatgcgcgcacacacgcatgtgcgtgcacacacagtgtaagattcctgtgaaactcggagaggctcttgcacatgtgacagacagtgctggagatgaccttctggtgtctagccatcttccctgtcctctcaatcaccaattcaacacacatttatcaaatgcccaccatcactgttcacaagtaacccaggtggcttataagagcagagcctcaccccatcctcagactttattaacttaaataaaagccctggagctggctggcagacccagaacatgtctgtctccaacctccctcctagtgggagcatgatgcaggaatggcagctgagtgccagttagggtgacacctctatttctatgaggatgacacaaagaagaactgaattataccaggctgtgaatttcgcagagagttgcaaagtttgttgactaagtcacaaagggctgcatcaacttcctggggccaaatcctggcatggctttctacagacgattttcccctctctgtgccttctggtcttcatctgccttaaggtcatggccaaagctcagaaggtttgggcctgatagagtaactgctgaggacggccaaatctcatctctgcaggcaaagcctgtctttcttttgggtttaagacagggggtggcaaactctttctgtaaagggccagatagtaaatattgtaggctttacaggccatatggtccctgtcgcagttactcaactctgctgttatagtgagaaagcagctatagacaatacatgtacgagtgagcatggctgtgcgccaataaaactttatttacaaaagcaggtggctagccagattcagcccacggactggagtttgccgatccctggattaaaaaaagattgttccctggactggacacatccctgctctctgcctcagcccggggagaccacttctgcatgtacttcctgctcactcccccagccccacacccctgagaactgaagctgacagtgagaagcctggtcccagcagggggcagcgggagggggctgagccaggcagggccctgtgcatgtgcatctcacttcagcctctcagctgcctatgagagtggacaaatgagggactctggccccaggcaggtgagaactgttaaggccactgggctggtaagcagtggagctgggctgagacccttcccacgctgcccctgttacagtgacttcccagtgacctctgtgagctttgctgtggggtgccctctgtagcatcttctcattcccatgtgctagccagggcctggaaaggcagactcatgccgtgtgcctactccatctcccttgatgggagacataccactccagggaccctagagatcctgggatttcaaaatccctgggtgaatcactgaataggcagaggcccaggaagagtaccaatttgcccaaggtaaatgaaggtccccaagtccctgccctagggcctttctataccaacattcaatgcctggtcccctccctctgagacaggtgttcagtgcatctggctgggcactgggaaagggcaggaacaagacctaaactctacccttgaggagtttacagcagaggggaggggaaatataagcaggcagccaggagcaaagaggataggtatttggatggggcctccaggctcagaacacagcttcccccaaggaacctgactacagggagtagtcaggcctgatctaactccttcttccacacccctcagcctgaaggtgggaccaggattagcacctatgtctaccagaagtgagaagagtagcctggcacccccagcagtcactgcagcatagggacatggcctccagcacagtgcctgtccttgaactgggaaaggtgggttcttgttgttaggagcttggcctccaggctgggtttggcacagaggtgctctcagtggaaggagggagccacagtaggaaggtctgatttgggggtgtttggaatcaattccagctcatccatcccccaagcaggactgggcccccagaactctccttggctttcaagagtcagggaagggaaacagaggtgcagaagcattaaggtccgcttgggccagctcctacctgacaatgctccattctggctcaatccgcacgatggtggggtcttccacatactgaaagaccaggtcctggtggatcttggccctgtccacctgcaccgacaccttcatctctagcacctcatctgaggatgtggtgttgcagacaatgtaggatggagatcgcctggagggcaggaagacagagcactgggcgcctggtgttgaggaggacagaggtcctgagtcaaggccctcccacaccgctccctgcatgtcaggatgctcagaggccatgggtgggtgctctcagacagaaaactggagagccagtgacaaagactctccttggccaaactttagacaggttcctctgagccttcttttcaaataggcctcatccctgggtctgtctttggcctgtctagccttgttttttagcaagaatctggctaagtctatttggggagaaccctcccatacttgacatctgatcaccctggcctgcctttgcaagaatcacgttaagttggtttagcaggagtccatctaccttgatgtatcctcttagtgatttttcattcactgagccccttattctgctcattggctataaaccccctgctgtctttgtagtatttggagttgagccccatctgttttccctgatgcagtagtcttgacatcagttgcaatcgtcctgagtcttccttgccattttaacaagtgtcagaataaataattgtttctttaacactactgatgccaggcctggccaggtctgacttgggaattgtcacagctctcagcgtagctccctcaaggaaaaatcctctctctagagaatctcaggccagctgagggagcttctccagccacattgcctagagtccttcactgaatgcacctcctgccttgctcctaccccctaggctccagttcatgacaggtgtgcccttctggggctgcacagtaggaccaggggaggcaaggtcacctggccttgtaggctcaacctcaaccactggattgctgtgcctatcatctctgagcaggtccagctggctctgcagctcccagagtggatctgaccctcgtgaatgggctttagttgtagattccaaattgcattctggggtaacctagggttctgcagagtgggtgctatgggggcaccagggctaactgatgggccatgaagcatatggagcccatccagggaagggagggctgacaggtctccagactgagcccaaatcctctcccaaagagcacgtccactttgttaggcaggaggagtacttccaagccataaggtgattgaaaccacctttgcaaaaattgttgcaaaaaagtgtggcacctgtgcaaaaatttctgacatagaaaaattatcacagtgcaagtctgacctaacggaccctatcttgcttttaacctccaagctacccttgttcattcctgggcacagaccaagctaactataggaggaatttagtttatagtttaattttgtaacaaagatgataacagccttttcctgaaacaaaccccctctttgcctggggaccagagagcctacctttgaaaaactaacaaattcgccacaagatcagaaattatgactcaggaggcacataagcaacaagaggccacaagattccaaatgttcccaattgctcctatggataacatcactattgtaaaacctaagatcactgtttgagatacttttcagatcctgaattctgattgaccagctggtaccacccagaccagtaacgtggctcaactagttctgcgatcccacccaggaactgaagacagcaagaaaaacctatttcaactttatacaatttcatctgcaacccaaccaatcagcattccccactccctaaccccccgcctgccaaattatccttaaaaaaaccctagtctccaaattttcagggagactgatttgaatcatacaactccgatctcccatttagccagctctgtattgattaaattctttctctattgcaataatgctgtctcaggaaattggctctatctgtgcagctggcaagaagaacctgtcaggtggttacaccctcccaactctctgcaataaaaacaaagctaccctgaagtcatttacctgtctaacctttccctctctggtgctgcagaaaggggccctctgagttacctgtggaagagacagggctgctttccaaacatcaccaccacgttgcttccggcattcaggttggtgcctgtgatggtcacttgggtccctccggacatgggcccccggctgggcttcagatctgagagagtcagtgtctgtgtagaaaggatgtggcctgagacacaaccaggaaggggtggaggaggcttctgggcaggcgtgaggcagcaccccactcccccaagctgccttctggaatctttggtaacagtggtctcccagagaaccagggcagttctcttaggcttgcgtggataggcagtgttccagaccctgagagtttgcatgcctatcttagtaatagtaatactaatagctgccatgtacttattttttaagtgtcagattgtacatcttcataattatacatgtatgtgtatatatccctatatacacatacatatatataatttaatcaccaatcaattctttaaagtaggcattattattttacagaagagattcagagatgttaagctagttttccaaggtcacacagctaaaaaaaaaaaatggcataactgagatcttaccccagagctccagttctcaacccctctctgacctacagctctgttcttgggtggtaaactgtctctcccacaggtctctacaaagagctgcccaaagcacccagtggcagagcaatgggaagtgagagccccagggaaactcagagagagaaacagaaaagagtcagttgctttcaagggctgcccccagccctctgccagaatgggaccagtgaggagtccaggttgggggcagggcagaaaaaagctcttgacagctggggatttggagttgcagtttgttctttcattagcattttaatggaaaaactttcctcagtcccaggtgagaagcctgtatctgcatttaaatgaagatttctctctcccttccccagctacctcctccttaaagaattcagcaccaaaagtcgaaccctctcagttccttggagcaggctgacaacctccccttggagatgctttgatagggaagccccagagcttccctatcacctggcacatgcgcctccaggtccaggatcagggcacatgggtgaggagacacgcagaccacagctcctgacctgcctcaccaggtctcagcaccctgtctctggatcccaggtctagtatccctgtaacatgggccaagccaaggaatagcttgtcattttggctcaaccagagaccaggaagagggtggggtgaggctgtggaaagagccctcctttctcagctctgcctggatctcgctgtgtgactctggacaagacatttcacctctctcatcaacaaaatcagggggctgagccaaaaagtggtgatcttcaaggctcctggcagttctcttgttctgtaacttgcagtacctcttcaaatggtacttgtgcccatcttaaagtatccccaccaaccttcccagagaggaaaggaaaggaaaggaaaggaaaggaaaggaaaggaaaggagagagagagagagagagagagagagagagagagaaagagagagagagagagagagagagagagagagagagaagattgtgcacacaggcttcgatgcagggatggtcctaaagagacagagttgaactcagggaagttaaaatagatgggggttggtgctccctggcagcctgtgggtgagggttcttagaaggggtagaagtgagtaatccctgcaggtgttgctggggcactatcaaggggctcactggtggggagaggatgttatggatacatgttttagagttgtgagaagctattaattattcaagccatgcttcataaatatttcacggtgggtttgcacaggaaatcaaattctgcattacttgccacctcttcacttggctccatgaatggaggtagagggaagggggaaagcattccctgcatggagacctttaggaacagctagtgacagcccagggtgttaatctggggcctcttggtcttggcatttggtttttgatgaataaacccacaaattggagtctggcctgattgtgggagaggacaaatcttccctctagccttggtactaaaaagggtctccccaacatgccccaagtcctggggaaagagcttcctggctgtctcagaactccaggggagctaggggcttctgtgtagggcccaaagagtgcacctgcaagctgcctggtagatgagaaggccatgagggctcggagactctggaaagtgtgatagatgggggttctgtcccttctcaaccccctgcggagactcatggggacctctgtccctcactcccacctggaatccctagaaactctgtgtgagggatgggggtgggcctcaatgacacaacccttaaatgcaaggggccagagaaagagactggtgtccctagcactatctccttcctaaagtcttcccaagtgaacatgtggcaccagagccattcctcaaagatgtcccttaagtagaaaaatgacaaatctttgagcttcagggacctaccagatcaatgcatatttgcctgtggcaacctctgtcatctgtcctgacctgcctctgcttcagtctctcctgctcaccacccaccttcttccttctccctcctgttcccatcttttggtgcactagaccttatgctgggaacagcctcccaccacttcagatccacatggaaaattatattctatttgtattatacaaattccatctttgcctccagcttcttctaggaagtctcccttaataccctaaattcaatcacacccctctccagggtaggaacaatcacacagccaagactggacccttcctgagggcagatgagactttccaatgtgtagcacacaggctcattataagaataaaagcagagagctgagtgcattggtacatgggagctactcaggaaacatcctttctcctaggtcagggggcctcagcccagcttgcatctcagaattacccaggatctgtagcattggatttaattagtcctggcaggaggcagggagaggtccagggcattttgtttaatggtcaccccaccccaggagactctcctgtgtccggaggtttagcgctgcctatgcactgtggggatcccaaagaaaagaaagtcctgggcttcagctgatctttgatggagcctcaggggtgggggcctggctgcaaatgcagagcagaggcagagaggcttaaaggaagcatcagcttaatgaggtggcggtgattctagccctgtccactgtgtgctccagggtccctgccaaggaccacaggatggaaaattgctctgggcaggtggcaggccaaggcaagtggctcccaagactgactggtttgacgaggagcagggcacaaagaggagccactgagcggtgtgatgcagtcagatgtctggagtcccagtaaatggggtggggtgcagggcctgtggatatccacagctcaggcctctgcattcgcagactgaggactgggtcccgagcacaactttgacgaataaggaggatatggctcgtgcaaccaagagaaggagatagagaagataaggtggcagatcatgcaaaggctggcaaaataggattgaatggggaagcagacagaggagcctgggcaatgttttacagggagggggagccttggctcttcttgaggtggcggctgacatgatggtagatggattacaacaggttcagagagaaaagcaagggaaagatttaaggaggccgttgtgatggcaaacagaatgggaaaaggaagactctgggacatggtgatggattgatgtcaggaatgaagggatgctgagccacagcccaacaggattgtaggcctaggggatggatcactgatgggaataggcaagagaggaggatgcactctttatgggagctgacagcctgggtgggccaagtggagatgaaagtgaacagccaggtgatggtggccttgattgagccgctggagtgaggggcctgactggggaagcagggcagaggcagctaaggttcaaaagaagcatcagcttagtaagttggaggtggctctagccctgtccactttatcattcaggatcactgccaagaacctcaggatggaaagctgctctgggcagtggctggccaaggaagtccagtgcttgctttggccatgcagcagtttcctcccgttttactttggctgccaggaaatttcaaagccagatttcttgcccaattttagcaaatacctggcgaatgtcatccctcctctctccatctctctctctctctctctctctgtctctatgtctatatcatatactatatatatatatatacacacacacacacacacatatatatgcatgctttatatacaaatatatatacatttctcattagttgtcttaatgtctattgggttcaccttggaaattccctcatgctttcaggagaaggtggtgggtacaaatcctaaacaaataaggaaaatgactcgtccatgaaccccattatatgtgcgtattcttctaattttatgaattcctatgtgcattctgtgacagccaactgcatccagagggggtttggccctcggagagcagaggtggagcagatgcaggcccagtcatggtgtggcacgacactcacgtttctctaaggtttggccctgaccatgttcaagtctgtgtcaagtacttgagctcagttgctttcacctccccttctagactgtaggcctcctgagggaggtgctgtgttgggtcttattcatcatccattaacccccacagccagaaccatcaagtcataaaatccaactcaattaaacaagcactcattaaataatctagtgagaggcattgtgcaaggtgatcaatggctgtcagttgaagaaggaagaaggaggaggaggaaggcagatgagataaaggagggagggaggaaggaaggaagcaaagaaagaggaagaaaggaagggagggagaaaggaagcaaggaaggaaggaagggagagaggaaaggaggagagagagatggaggcgaggggtgggggtgcagaaggaggaaagagggagacagagaggaaggagaatgaaagccaaactccccatgacatatttcagggcacatgatggccaggcataaaatccatcacttcaggcttccagcttccaaaagcagctcagaatcatgaggaaattataccattacagctgtcattaatctgagaggtttagtttttaaaatgatgggtgtgtgcggcagggaatgtgtttatgtctccaccatctccataatcacaaggctgagagattccaaaagcctctgtcccctagaactacttgtcaggcagcctttgaagggatgagaggttccaggcaggaaggaatttaaggactggggagagatcctcagaaaggccatgggatggggaaaggggtggtagggtgagaggtgggggcaattgtgtgggtagagggaaatggattgggtatgcaggtgagaggtgggcaggggttaatgaggtcatgaaatagggataatggtgagtgggtgctatggtttgagtgcatcttccaaagtcatgtcttgaaagcttaatccccaatttaacagtgttgagatgttggacttttaagaggtgattagtttataagggctctgccctcatgaatggattaatgttactatcataggaagatgtttattatcaaagagtgggtttgttatgaaaggcagttccaccctctcccgctcttgctctcttgcacacagtctcctgacttttcgctttctgccacgaggtgacgcagcaagaaggcacttgccagatgtagcccctagatcttggacttcccagcctccagaacaaggagtcaaataaatgactcttctttatcaattacccagtctcaggcattcttctacagcagcagtaaacagactaagacactggggtgaaggagtagtgtgagggagataggatggcataatgggccacaagtgtgcagggacaggccagaaaatggaagcaatggtggcaaccacagaaataataaaacaaatgatactagaagtcataaatacattgatgtaattttccacaagatcatggggttgatactattattatcctcattttataaatgaagaaactgaggcaaaaacaaaatgttgagcaacttgcccacatttacccagttagcaagtggaagagccaggtatcaaatcccaggagttgccttgtgaagtccaagctcttgcctacctaccatgccacactgccatgcacccacctggggactctgggccctgagagctaaagcaacttacctgaaaccacacagccaggcacagaaaagtctggatttgaatccaggtcttccagacttcaaaggctgtgctctcactcactataagacaggagtctcatgaactgagggaggttgcagggcaggcccttgccctgggtttgctcacagagctctagaggggcccagcaatcatggtaatgagctctgtggcctgcacccagccagatcactgctggccaagactcaccatgaagtaatagagctgtgaggaccgggccatgaattcaggccgacacacagccacgcagatctccacgaagcctgcatgctggctgggcttggcctcccccatctcacacacgatcctgcagggaggataggagaaatcccatgggtcacaggacttccagccaagaccctgcaccccacagcacctacccaggtccctttctccacagtaggatctcagggatggccaggtaggggaggaaggggaagatatcctaattcctcctagcaggggcttctccttaattgtcaggcaatgacgaaaactgacctatgggatctcctttgagggagcctagaagagggtccctgtgttctgaccctagatgttcagtccctaattcattattatctactcagttgtcaactagactggagggcatgttctagccaaaacccttagggaatagggctggcagagtccagagaggcaaagccacttacccaagggctgcagcaagtcaaaccagaacttggaacagacctaaggttttctggtccccacctgggagctttctgctcccgatgattgggttgcctcagtgaagtgcttttgcttcccagccagcctccaggctgggtgaggggataattgagtgtgtgtgtgtatgtgtgtgtatgcgtgtgtgaactttttcctttctaaaaatttttattgctttgattacaaaatttgtttataccctttgaaaataatcaaacagtcaaacagtacagagtatggcagtaaaaagtgagtgccccattcttcttaaaacttaaaactatatatacacttaaaagttaagtgtgtgtatatgtatgtatctttgcagacataatatataaatatatatgtgtatatatatctatgtatatatgtatatgtattcttcattttacaaatgaagaaactggggcaaagaaaagttaggcaacttgcccaatacatatatttgcatacatatacacatatatacgtacacacatatgtatatttatatttgtatttcatatgcaggcacacatgaacataaatgtgtttttacatatatacaattacacttataaacatgcatacgtaaggaaagatatatgtgtttttttaaaataaaagcaaaacataacatatccactgctataaacacttctgttttttgctcagcacaatagcatggaccttccttcctgtctctgtagacacggctcgacttttttcttttcagcagcctcacagtatttcatctgatgattgcactatcatttacacaaccatcttcctattgatgaacgtttagttgtcctgatttttctgctactccaaataattctgcaaaatgaaccaactgacacacacatccttaggcattgtatagtaggatagatttctaaggaaggaacctgttgggtcggtttgtgtatttaatatttggtaggtagagccaaataatgttccaagaagtctggaccatgcacttctattgatggcccactcttttgccaacaccagatatgaacaatccttttaaggtttttccaatataatgggggaaaaaatctcatttttatttttattttgcaaattacaggtgaggtttcataaattttcacatgggtgtgtttttaagatctcatatagcctttcctttgacttttctgttgaagccctctttcttgctgatagattgtctgaattaggagtattaattttgtctgttataaatattgcaatgattttctccacgcttgtcatctttcaactgtggttccaatgtcttttgccacactaaagtttaaaagtatctgtgtgtttaagttggttgttctttaactttacggcttctatgttttatgtttctcttagaaacaacttttgagtaaggttcctgaacaaataataactttctatccagatcacataattaatgcatgtttggtgtttgaaacaaaatagaaagtacataaaagcacttgtcatactgaaacccccactagttgcaccattcagaatgtaattttccataagaccatggggtagatgccattattatcctcattttataaatgaagaaactgagacaaataaaatgttgagcaacttgcttacattcacccagtaagtaagtggcagagccagggctctagtcccaggaatctccttgtgaagtccaagctcttgcctacctaccatgccacgctgccttgcacccatgtgtaatatccagtgtcaacattttggtgtttctgtggccagtcttgcttttcttttacaaaactgattcaaaactctatattatgctttgtaacctgtgttccaagaacctgtgttctcacttaatataccttgagtatatgtctggtcatgattcttctataatatcagatttaatggctgtgtagttttctttccagtgcttatacaataatttattgaactgaggaattccctatttttacacatgtaaatcacttctgagtttttactattataaataaggctgaaataaacattcttgaaaataaatatttgtgaattctggttatttagggaaagttctagatgtgtgatggccaggctaaaggcttctaacccacatttccaaatttccttctagaaagtttgtcccaatttccccttacaccatgagtgaaggagtcagctacttctcatgactctctcctgcaccaggcattaactttcacaaaccactccctattgttttaatttgcatttaattgattactactgctgttaaacatttatttttcgtatgactttcggttcttttttatctcataaattgtacgttcatgctctttgatcattttgtgatctttgccttttatttataaaagctctttatatattaagaaaaagtatttattaactgtaatagggtataaccatactcccagtttatcattcacatttttattttgcttgcaatgatttttgatgcacaagttttaaggttttatgtactcaaatcccctaatctttttctttataatttcctctgttgctgttatacttcgcacaagttccccttcttgaaattgaataaatttccacctgcattttcttctaatcctttcacagtttcattttttttaaacttaactctttaatccatctggaatttattttggtgtgtaatgtggaataaggatctgctattgtactttttccagggagttaaccagcatcaattattgaatggtatttccttgggtgatttgaaatatcacctctattacatactaaatttgtatgcattagcattctttttctgggtcctctatcttactttactgatctaactggtatcacaatattttaatcatgtggctttataataatacttttgatatctggctatgtaaatccaaagtaggatattttaaaattctccaaatcacaatatattagcagtggcctagtttggtttcgttctagaaaggtgtcagaaagttgaaagagccatagaaagatcttttggtaactaagtggtgatggaccagagaggtgagtcctaccaagactggatccttaaaccatctgatctgctgtgagcatcttggggagatctcatggaaatcaggaggaattgaggatggctgtactgatggttcagaattagtaaatctaggcaagacccagcaagcagaaatggaaactgcactcacatacctaggggaagacttgcgaagagtcaataacttatgcatacagcacaagtgacaagatttcactccaggaagtgcaacaaagatggtatggaatatagattctatgatgctggtaaacatttcatagttgtgtttgctgggctggaaaatggtgcttacttatttacaaggccatgcatgattcacaaacctcctctactaggtgggttacaggtcaaggtcttttgctgaatgacccattcagtgggccagcagactttcaaagagaaaaataatctaaggcacccacaagcctcagagtgggtgtgaatttcattgtcagtctccacagagagtagcacaggatcagtgctgggggggatgtgagcgggaagttgaggacagcagaaggaattggatttacacttctcttgcagattttcattttgttttgtctcccctccatgcggccttatgccccaagtaggtaacagtcacctttctctctcagctatttctcctttccctctctacactttccccaatatggcagctagctaactgagcaggcggggagttgtgggagtccaccctccaactctaaaatattggggtggttctcctttttcccccacaacaagctctgagagcacctagttgctgaccaggacatccctaatactaacccgtcttccctcccctgttcctcctgtgttgcatgcagcttcacttactgttctgcagggatgtaaccatccactaaagggctgcactccacgccagcaaccttgacatgggaggcgatgtcgcgaaattccaggcccaggttctcccctcggatagtgaccttggtgcccccttcccgggggcctgtcaccgggattatctggagggaggaagagaaataattagacaaacaccaagatactgccactcacttgctgatgaggcaaggagaggctgctggctcttgtctcatctgccccagagtccctgagtggcttgaagtcaccaagggcacccaaagcctgcggtaatcaatgggtagtagcttctaggaaagcagtccatgtttgtgtgtgtcactaggagcagtatgcaaagcccatggtacatctttccatttcatagaagagatgagaggatggaacatgaccagcaatgctaccgggtgattcgtagaaaattgggattcatgccttctagcatttgcttgtgttggttctactctcaaggaaaataaaaacccctcctatccattcagagccccctacacctatgtgaccctacccacctctcaagatccttctcaaatgacactgccccataaccctgtgttcttcttctctctccatttaaattccaaggtaccttctttgtgccacttacatggcaacaattctttgtgcctgttcttcatccttcccactcccagccccctcctcctccgatcctgagtctctgagagcaggtctgtctccctccttgtgggcttttcagtaaccatctttatgtcttgcgttgtcatgtgataaaacctacaactgtccaaacatctttccggaattactatgagcatttgtcacaactcctttgccgttgttgtttggcctggtaccacatagatttaggtttaatttaaattttaccctcgtacacaggtcaaagtgtactggctttccctcctaaatcagtgtcaaaaacccatgattaaaatgtgaggactcagcatccaagtgcctgctttgaggtgagggctgtacagttaacacaatctcatcctggcgtttcatggaccagagaagggcatgcttccattcctggtgcctatgagcaccagcacctggaccttagccaatgtcagcaggattagaatggaaggagcccagagagtccatctctaccccttttcagcatatccaactctcctcaaccctgcagggccacaagtgggaattccatcctggggtaagggtgaaagatgggggaagcagaaggaactaggctgtgctgccctccccaccaagtggcagcttctccaggtgagactgcttacctgccacagtcaagctacctcccacctcctacacatccccgtgagggttggtgtgattgtgagtgagcgtgtgcaggggtgtgagcctgtgcataagtatattcccattgcagtggaaaaacagcttccctggagacacaggcccatttctatgagagggaggtggacagatgtggggaaggtcagagggagagtctgtgttcttcccaaatgcctgcctagccagtccccaaagtgccactggcatctggcagcagtgtctccatgatattctagccctggcttgtcatactgaaaaaggagttttatctctggcccactccttcgtttcccaggttcccctagggccaacaccagtatggaggcagtaaatagcctttgtcacagggagatatgtttaatttgccgtctcctccctgtgattttcttggacataggccaagaagaaagcaagtcccactgatggcaccagacacactgccatgcgcagcagccccctgggttggtttcttgttgagggctctgggaggagccgttccacagagcaggtgtgaaggtgagcggtggggactgggaagggaggacatgggcccaggtatggggtcaggggcagtgaggagagaagaggtccacctgtcctcctattccagatcattctgtaggttaattctgcaaatatttcctccaagtctgagaatcactgtttagattcctaccatgcaaaagactgaagtggggactgagagaaactctcagagcctgtatagccaggaatgtggaagataaagggtctgaagcatggggcacatgttgagggccaccccaaggggctgctttgctgggtgaggcccacaaaagcccacacacaaatgtgtaggaggcccacaaaagccaagaatcttcttgctttcacacatccctggtgcacgtgcacaatttgtgagtgggggtatgaagtctcaccattgtagtggaggagaacaataacctaggagaacattactcaggagatctgggattcaggaccatgttactgacactttggttagagtatgtgtgcctctctgagcattagcctctgtctggaagagaataataacctgatgataaccctggccttgggagacattatgggtttgaattgtgtttccatcaaagtcacagggtgaagttctaaccccagtgtctcagaatgtgtccttatttgaagacagggtctttggagaggcaatcaaatttgaaggagaccattaggatgggctttggtacaatatgatctaatgaaaaagaaatttggccacagaggaatgcacaaagagaagatgatgggaagctacacagggagaagatggccatctccgagtcaaggagagggatggggaacagatgcttccctcacagccctcaggaggaaccgaccctgccaacaccttgatcttgaccgtctacctcctgaacggcaggacgatccatttctgtcgtgcaagctgcctagtctgcagtaccttgtgacggcagccctgggaccctaatagaacaggtagttgtttggactgacaaggtaaggggtgtaaaggtgtggtgcaactattaggcatcacacaaatatatggcctatgactgtgcctgccactgttaagtgatcatatactgtgtgcatttgtgaaactgtgcacaaagcccggtaccagttcgtcctcactgttcactgaggcagagactgagtctctgtcttctctccttctccctcttcctgctgcttcataatcctgaccagcatccgcagtggtaaagaggtattgagcacctactgtgtgctcagccctgagctggaggcacagatgccatggtgccacagatgacatggtgccatgggggaggagcatgtggagagagagatgcagccctcttttttattttaagagggagcaagggactccagccttgctggaagagtgcaggagtgggaggagaagagacaggactacttaaatgaactccaggggcagtgatttccttggcttagacatccctgggaatgattttaccaatgatgatgagtgaggaggctggtgagatccccatgagctgggcccagagcaaggtaccttgcctgtaggtgcgtgtgaaatccttccagctcccatgtgagagggacgctcaggcccaccgcacatgtgaggaaggtgaggtgtggagatactggtgatttagccccaaggtactcagcaaacagctggtggagcctggattcaaaccctattctctgggacccagtgtctgcgtgtttggctcttcaccgtgttcctcccccaggtctttgctccatggcctgtgtccctttggtccccctaaactgtgctccatcttacagctcagggcttgctttgggggagttcaaagacctctctgttgtgaccttcttcacctccccagagccaggctgtgccccaacacccatgccacctccaatcacgggttgacacttggtgaggatgccaaaggtggaacttcaggccttgccaccgaggctcttagagacaaaggaaggggctggcgaggactgagtcctttttgacacagctcctcagagactccaacaggacagttgggcccctcattgaggatagtcgagccccaaaaagagtctctgatccaagcctaagcttctggggaagccgtgaagaaaaactagggtgccatccagccaggcagagcaaccaagtccacccagtgactactgggtgaccgacaccacggctgggcagagtttccacagggtgtggcacagcagcctggagcctgcccatttggagcaggaggcccgaccccggcttacctctgtgatgcgggggtttgtgcacttgcttttggcaccagacagctccagccactggctctcctgggcagggcagtgctggcgcagggtgcactggcctgggccctggcaccagccacatgcgaagtctgggtcagccttgaggcacagcccgcagctctcacgcatggctccacacttgtagaggtgaactgcagaggggaagggcaaggacaaggggtgcttgggaatggcagtggggacagaaggggcccagagagagacaaagagtgcagtgccagcctggggtgatggggcacaaaggcagttttgcccccttagccattctgatgcaaaaaagaacctgaaagaaagtccaggcctgagcagagggactgaaatgggaagctctggggttctccgttcactcagcactcagcagcccttcccaggaagtcctctgcacaccacctcctaccagaagccctcagcccaggtcaagctctacagagcccatgctcaagaagtaacctagaagcacagatggtggagaggctgtgaaggaggggctcagagggagagggacagccactaggaggcgggggcagaatgactcccgcgagaatgcaggacggctccttccctctctaccccatcccttcccctccctcccctgctaggccccagcccttccacacctttattctgagctgggttgtcaatgttgaagtgcccattccacacgactgtcaactccacgggcaggttgttgatctccatcccttcataggaatactgcagccaggtcggggaggaggaaagaagaaagtggggtcacagagagttctagagagggcccaaatgatcagcctacggccgttaagagctcacaggctaaagactggccaagactgtgcttgtgtgcatgtgtctacctgtgtgcatacaagtatgcacatgcacatgtgtgtacaggcagggaagtgcatatcagagggggtggaagataacacaggggtgggccaggcctccaagcatgcccctgtggatgccagctcaaggagcagatgggagcaagccactaggtcatctcctgtgggtctcaggcaggaggcctgctcccatcccctggaatttcctgagaggtaaaaccgagggaggagtccacttcctctctggctgcccagggaaaccctggtccctaggccctcccaagtctgcaattagattggggaactctaatttccaggaaatgtccagggtaggtggatgctttaccaaagacctggggaggggtgatcacttcccaggcagggcggtggttgcagagactaagaaatgaaggagctacaccctagggggatgagaggctgggggttaagagagaagaggactagatgggagcttgttggtgacgggggaaatcctgaggaccttggaggacaaatctggaaatctgggcctggatgctgcagacagtcaccagctcaaagccaggctcacgcccagattcctgttgtgctcctgtcctcggagggctcctcagggtcctgctcccctacctggctgagagataggaggtggagggtggagagaagagggaggtgctggcttgaagatgatggtggagggggcagtccccaggcatgatggcccctagtctgccttcccatagcagacccctctcagtctccagagaaagagggttagcagagggaacttagagcccaccctgggcagcaatttccaacccctacctggtgattttctcattattccagccgactctgctcgccacaaggggcaggatggaagaatggaattgagacagattttctgcatgggaggggctgaggcctggcaatttgttgaacgaagttagtccagaggaccaggtttgaagctgtgtttgcaggacctacaggctgttttaattcaaatttaatttgaattaaaaatttggagggctgggctagggggatgttgatggatatcacaggaggccactgaggctccgtcctccaagttggccatggcaccttcatggacagggagggtggccacaggacatgggaaaacacatctgggaagaatctcagagggctactgcctctgggcagggacaggtctgcaccctatttgtaggagcttctaaaggagatgttctaatcttcgatgcagaaaattgccctaaattcctgagttacggaatgtgctcccatgagaacagactgtgacttgacattgccctcatacagcaaccacggggggatgtacctccagccactcctggctctgccctagcatccagagttctaacttcctccctggcaacgcgtgccagggccagagagctaggttcggtgtttgtcccacaacggaggagtttgcaacgtacccccgtcgttgaatctctcgtttgaccaatggcacccgggccaaggccagggtccgagctcacagagtaaagcaaagtttcctagccctgcagaaaccacagtggaaactttgatcatcatagaactcaatcatcacctccccagaggttgtctctgcagctgggtcaggctgggtggtcctaagttgtcctgaaaacctcttccactttagactggtggctcttagagtggtctatggattccttcagcagaatcacccggggggcctactaaaatgcagattccagggcccatcccagatctgccggactggaatctctaaagatgaggagcattttgagagctactctgtgattccggtgctggttaaagttagagaatccctgcagtctattagaagtagggaggcagatgactgccccagtggagggagaagggtataagagagggatgccctccttccttgtgtgtgtttgtgtgtttgtgtgtgtgtgagagagagagagagagagaacttccaggcttccagttccctcctccagccacattcaatttcttcccatccttcccatctctctccttgaaagtcccagtggggaaaggtgatctcaccaggcttcaagctgctgcctggatggctctgagcagggctggctgtttcaccccaagctgagcaccatctgatcacctagaggcagtgctggggcaggctgagctctgacctgtaggagggatgctgacagtggctatgtcaagatgggagcctggcttctgctctcaggcctaggtctggccaagacacaaagtagaagcagcaggtggtgaccaggagtgttagtcaaaaatcaataaatcctcatgccccctctcaggaaggacctgacatcccacagaaaggaaggcaaagaatcctacatacatatgcatgtgagcatctgtgtactcaaacgtgtttatgtgcatgctgacttgaggagacgttagcacacatctccatgttatctgtatgtccataagtgcacacacacgcatagacacacagacacacacagttccacaaagtggttctgccagtgaccagctgtgtgaaatgagcagataatccaagtcttagtttccccattggtaaagtgggaattcaaagcagtacacatctccttggattggcataaggattcaagatcatgcacagcatgctccgagcatagtatctgtcatatagtctaagcgctcaaatgtgattgcgtattttagtctatgtgcatgcagttggggatgctatgcaaaactatattcgtgttgcctatgtttatgtttgtgcagaaaaataatagcagccatgcattgagtgtttctgtgccagacccttaatatgtatggggatgtatacatatgagaacgcttatgttttctggtgtgtgtgtgtgtgtgtgtgtgtgtgtgtgtgtgcgcatgtgtgcaagcataaattttctctttgaagaaattgaaaataaaaaagacattaggatcacatgtgctgggcatttctttctctttctctcccccaatcctgggatctaatgactattagagaaatcgttaaccccatgtgctccccctcagccccgctctgtctctagggaagtttccattgttcctggaggctctctctcctgtggatgacctgcaacgtgcctggggcagggtaggggaaaggggtgggcatggcagatggagcctctctgcctctgcagacagctgggagcctggaccacgggctcccgtcccccaggatcgccctatctccactccacttagcatttatatagctctctgtaatcagcaggcagttaatctgcacaaagctcagagcccagggaggacaggctccaggctcctggaggccgggaggttaagtgtctcaatcaaggtctggcacaccatgcggggctaatggatgactttccccattaccttgggaaagtgtgaacctcagcttctacttctaaagcaaaaatgagacctcgatataactgagacattctttcctccagccagtcccttgtcccaagatctgagatattttgccggaaagttctgccatttgggcaaacaaatctcaacaacctaatgccacacaagaagctggtatgtacactgtgtccatctctagtccagagggctctgctgaccccttttcagccatgtcccagtaaagtagaaaggggacaagttctcttcctattgcttccctatccctgttttgcacgtggtaaatgacggtgccaagagaaaaccagaggccagcatgagtccgcggaagctgggcctggccccggccctcacgaccagcacttcagccagccagatgccctttgcagccccctcactggcatgattggcagcctccgagagctggtggccacgcactattattagcagcacttgacattttcctagagcattggtctaaagtaggccatgaatacccacagttgcttcccctccactgctgcctgtgagtctgccctgtcctcctcccaccagctcctgggggctgcagccattggctcaaggcctgtccccgcataatggggttggaaatggctccaccaccccaacccagtgtcactcccacactgaattttcttcttttttctctgctctcctttgagaccaatttatcacccacctccttctgccatcacaaactcatggatttctttgttagatcccttgtccaaggctgtttccaattgttcatggatttaggaaatgaaaaaatttgtccttccacacaatcctctttgaggctgatcagactgtactcccaggaataacaccaaagctggggtagaaagtgcccttcgctgctgttctttgctcaacctttgattaggggatgtgttatgaaactggattcaagttctgaatttgtgccttacttgctgtgtgatctggagatggtcacttgccctctctgggccttggagacctcatctgtaacaggattaagtagataccctctcaggtctattcttgtctgatggtaccctgttttctgtaactatggtgggggtgggttgccccgatcatgaccccaaagatatttgatggaaattgcttgatggtaagaagcaacctgacccagaccagcatttaaactgggattccactgccccccatgaaaagagaggctcccaggaaatgtcagagctgagccctcctgaaccatgtgattccagtgtgtcctagtaagcaaagggctgcattctactgtctgaggggcacaccttctgttgcctcagtttctttcttagactttaaaatggtagagaaatcacctctcctacaactaatggtgtcaaaattaaaaagtcatggaggcaaagtcagctgagctgctttggaagcagtgacctggggggcacccagacctggcccatggtggatggagaggctgcagctctgaactccagagggccagagcgcagcaggagccctcctcaggtcctgagttgggggcagggcatgagccaggagcttcaacatcaggttctcttcttggtgaagggagccgcagcttccaggcctccagctccaatgccaacaggggctggaagtagaaatgaccactgtgtcctgggacatcaggcttccagatgtgaaattcccaggggaggagctatgtcacttgctgatttcttgaggtccaaggattcaacacccgacagacagactgtgcgcacactggagcccagccgttcccttccttttcccatgggtgccgaccatggtgccagctccaggtaccccatggggacaccatgaaggaggagacagcacccacctgcctggtgctgcggagaccctgtttgtgctcttgttcccaggaggctctgatttcacacccacgttcggggagttccctgtgatggctaaggactcatttggtcaggcagctctcggcctgggaaatgctgaggacatttcaacacaatctacttccaattctggcagtcaatagaatggcagagggtcccagcgagcttcttggaagctaaagttagtccccagggcacaagggatcttctgaccaagaggtttagaagactaactcatgctgttgtctggagtatctttgtctattaacggagtcaaccaaaggccaggccatggggcccagttttatgacactagtgtccctctcttgggcacagccatctgaggcccacaggctctatccaccctcctgacatccccagatccttgggtcagcttctctcaagaaacaaggctgttttccccacagcttcagatcctcaccagccttctgcagagtcaaatgtgagacccagatgcaggtctctttctatagggagggtcttgttttggagagaatgacttgagccaaacccttggggctgatctgcttgaactcagaatttatggggaaacaggaggtgtttcatatctcctttgcttgcaggtttaatctggagtgctgcagaaatctgagaaatagcctggcagccaggggaggagggggatgggcacacaggatgccatggggacaacttctggggtttcagaggttgtgagagcagtgaccagttctatccctgtaatgctgagtgacctagggcaagtgtgtgggcctctctgagctccatttccccctggactacttcctgcaggaagagtagagtgtcccacgaaatcctttgtctgggactctcctggtcgcacatcacatctccaaatacagacattgcacataagtgcccaggtgcaactagaagaatacataggaagcagtgtgacataggaggggtcctcaaatccagaccacctctgccactcactagttgtgtgaccttgagcaagtcacttaccttctggcacattttggggtgcattacaccaaagtgaatagagctcagcttctgggcctacacttgcacactcagccccttctaaggcctatgtatctaagttgtacttattatattttggtcttaaagaaggtctccaaatggtatgtctcaccccacaaatctagatctgcccctgcttccaggcctctactttctcttttgtgcagtgaagaaaaactttaaagttcctatgacttgaaaatgttctgaatctatgtgtctagtgtttgtctctgagcatctgggcacaaagaagggagcccagaaagaaagagagagaccagagcagtagctggaaaggcaacatggcaggtgcgaagggaagtcaggaaaggtgatacacaggtggggttcactgtggggtacctaggaattaggtagacagctgtcggcagcctgggggctgctgactactcattgatagggcttgggcttaatgtggatttgccacacattgggcagggtttgcgctgatctaagcagcgctctcctagccagctccttcccatttgttatttcctcctgccaatgcttggtctgtctcagaagccttctctgctgagaaacagcctctatgtaggtgtgaaggtggtgggatgtctttggggcttgttgagaaggcagggcgcagggctttcagagcttctcaggaaagaggatggacatgaaggtacctggagcccagcgtctgcccataaacagggctcacagctccacggctggtccaatatcccttctaatcctgtcttacacggacaaccttcatcacaaaacatttacaactagggccaggccctgggtgacctcagaacccagcacgctgctggggcaggtgttgtggggctgggatgtgccagcaggcatgggggaagcaggtaggcagttttgtgcgtgttgaggaaacgactgcagggctgagctgatttggctcctagaagacaacagtgatgtgggtgggactggggcctggtttggcagtgggcagggttgggcgactcacagaggtgttctggcactgtacgctggagctgttgaagcgcagggcgggcactcgctgctcgctgccctgaatgttgaggatgcattcgtagccacgctgcccagactggggctgggggaggttcttggccttcagcgtgataggcttgatcacctccacgggcaccaggatcttgtccactcgcagcagctgggggcagtcctggggacagagggcatggctcaggctgggcagccaggaaaccaaatgagcaaggacctctgcagacataacccggatgttccctgtctccacccttccatggacacacccacaggcgacccctgaggtgctcgtgcccacccagtgggcaatgcactgaggacagaaatgaaactgaggaatccgaagtcctagtgtcatatcttgaggtggtccccaccctctttgggttccatgaaaaccttccctatgcaatctggattctctgacactcctgtagcctcctcctggcacccttctaccctagtagagactgcctctgcgggctaggcctcccctcccactggggactgatgatttctttgcctgctaagttccaggctgtcaagaattgggatgcacagaccatgtgagaagctccgcagagaggcaaagccctgggccctgttctgcccctggaatgtgagtcttgactgccgcagggaggctgggagggccttccctaaatgggctgaatctgatgtttgagaatgttctggaatgggccccagaggcctcataaatccagaaagcttctgaccaagctctaggatgtcctggccccaaagaaatgcctctcagagtagaaacactctgagctctttctggatgctagcaatgggcacacttagccctggagccacaggagcccagatggcctttgggatggagacagtgaatcactgggcccctttttcctggggctatcagctttgtccagggagggctggggacataaggaggtcagaagaaggagggtgggtgctctgcccagttgagtggtaggagctggtgtgttgctgtattctcaggagctgtgtggaggagagtcagtattctagctcttgctgatggatgtgggcaggcgtgaagccttccataacacaagcatggcctgggcatcccctgtgccaggcaggtcccaccatcccccagattcctccatctgtggcactgtctggggcatgccaagacagatggctcctgggcaggttgatcatcaaaagcatgacgcacgtgttctttctgatggtgctttgtcatgggctcaccaccaactctcagcagaggcttctcaccccgcaccttaacacttgtcctcagcagagtaaggcagaaaggaagccactgggaaatggtggaagggaggggttctaggcagttaggcaactggcagctgtccctcccaggtcccagagcaaacatgagccaaatatctccctgtgccattgcgagttacaccataacaagacttaggctcagagggagaaggcttgaactaactctagtacccgtgagctgctgatgagctctggaactctgagcacatcacagcccatttgaaactcaatttccttatctatcagttgagtgggactccaaggccctaaccatcttaactcatcatgattccatgatttggagtggttgttctctccatcctttctgatcatccaaccagaaaagaggagggaaagagaggcaggggaaatggaagcaagaaagggagagagaaagctataagggaagctaggagacagagaggaagctggaggagcaagaccatggtccacagatggaccagcagtggagccttgtttcatgggagtgccccaggcccattaaactaatccctcctcccacacccctacaggctgctcacacctttatcctgaagggcagctgaaagaggagccgcagatccagaaattccactcctgggtttacgtgcccagaggaactgaaaacaaggactcagaaatctgcacacccatgttcacaacagcatcattcacaacagccaaaaggtagaagcaacccaggtgttcactgaggaatgaatgggtaaacaaaatgtggcctattcatacaatggaatattactcagccttaaaaagggaggaaactctgctataacatggatgaaccttggggacattatgctcagtgaaataagccagccacaaaatggcaaatactgcagggttccacttgtgggaggtcccttgagcagtcaaattcatagagacagaaagtagaatggtgatgtctaaggggaggcaggatgggtagttgtttgatgggaacagagcctcagttggggatggtggtgacagctgtacaacaatgtgaaatgtacttaacgccactgaactatatccttaaaaccggttcagatggtaaatgttatgatatgtgtattttgccacaattataaaacaatgaagaggagcagcaggcaggcgggccagcaggaagagaacaggggccttggtcttggccttcaccttgcatgtggtctgaggctctacagtgtgtgggtctctggagacgccagtagccacttggggagagtcttagcagctccatcctgtgccccccaccacagccgctactctagcaaggtgggaatgtggcacacagaggaaagaagcgatttgtgaaaatgatggagctcagaactggggcgggaggagagtgatgttggcagctcgaggagagcagatccttgagaatggggttgctgtgagtccaggctccactagactccaccctccctctgcctgagccctgggcagctttccctcccctgaagcagcaaggagcctgactgtctctcctgccacagtccctggagggaatcagatctggtcgcactgggagtgagagccaggaggccctggaatctcttcccaccacctcccgccatccacatgttgccactgagaaatgaggccctgagggtatgggaatctcagaatcctctgactaccctcatggaccccatctattttgcaaaggagaaactgaggcaaggagagcagaaagaagggctcagtatcagcagatgagctggtagctgaagaactcagatgccaactgcctgagtcaccaagtttctgcccttcatgaaacaggagagttcccaccagtgggcaggaccacctcaggatgggctggtcagtcagcaggggtccccctgaagtccaggggactcggagctgtgaaaccctccggagctgggctggaaccctgcctgggggctggactgttcttgtccaagacatggggagcagcaaaacctgtctcccacgtcccctgtaagattcttagtgaggcttgtgatgagttctctaatgagtcctgattatcggtagccccataaaggcctagtttgcatataaaaaggttggcagctctgagagtaagttcattaataataactggagaggcccagggctgggctgggcacattttcctctagtggcgctgctgattgaccccagtgtccctcctaattgaaatgtaaaacggcaatttctccctaggcaccaaggcatgaagggaccacttccaccaccctgccccttcctcccaccccagcatcccagatcctgacctgccccgcgctgagattccagatgcaaaatcacctacagatctgacactccagggcaacttcggataaactttcatgttcctccaggatgtgagcccgaggccctgtttcatggcccagggactcagggcacccagacctttatcttcaccttgaaggcttctcacccagcaggagtctggctgggaatcctgtaactgtgagaacaagtctgtctccccactcctcggctagtttcagagtcttgaacaagtgctctcaccattgcttggcttaaccatgactagggactgaaaattcctctcccaaatgaccattttggggattccataaactaacacatataaagcgtctggtccggggtgagtggacattcagcaaatgtttgttctttcctcctctttcctcccaacccaggttgcgtcttgtccctcatctgctccctttttccacctcatttccaaaagacccatctcccttgctcctgcctccatgtaattttctgcaaataccccagcagttcccacccagcttattccactcctctgggcttcacatcttaggataactctgcctaacttaaatagctctaagtgtcccaaacacaagggggactggcagggaggtcccagttctggccactgctccctgaacagcagcctccacttctgggaagtgacattgtaaagttgcatgctccatgtgctatgagacaggagatctgccagccatttggccttgggcaagcccctcaaaccctctgagtctctttattcataaaatgaagggattggtttggattcgatgaattgtgtagtccctggaatattgtgacatcagaaatatatattgggtcttttcctctggctgctggcacggtgcttctaaaacctttggagttttctgaatgattggtggaaaaggagcatcttttgttattcacagcaagcccttttccactatacctgagtttatgttcatgaggtgactcctggaggatgggggtatgttgccagaggatccacacatgtaattagaggatggcacttcagccctctcctctggggaagggagaggggctggtgattgagttcaaccatcagtgggcaatggtttaatcaatcatgcctatgtaaatcagcctccatcaacaccctaagtgaaggggttgggagagcttccctggtggtgaacaggtggcgatgctgacagggtggtgtccagagaggacaaggaagttctatgccccttcccataccttgctgtaggcactgctgcatctggctgtttatctgtatcctttgcaacacccttttaaagaaactagtaaacgtaagtaaatgtttccccgagttttgtgagctgttataacaaattatccaatctgaggaggggattgtgggagcccctgacttataactggtgggtcagaactgcaggtgacaacctcagatttgcaattggcatctgaagtggagacagtcttttgggactcagccctttaacttgtgagatccaatgctcactctgggcaggtagtgtcagaaatgaattgagttctaggctacccaagtggtttctgcagaggattggagaattgcttggtgtagaaaaaagccccacgcatttgctattgtgttaagcatagagaagaacggtttgttttccttttagtcccagttctatccactattaatagctgataatctggaatatataattgtatgatctttttgaagctcagttttcccacctctaaaatggggataataatacctgcaaaactagctcaaaatgtggcattcagcaaaccagtgaatgaatactgaaggcatgggggaggtgggcctccaaggggcggctcttcacctatcagcagggacatgttttaatattttaataattggtacgttgcaacctggtatggttgtccagttgagcaactggctctgataggcagcatgggatactgctgtgattctaattaacatggttaacttggtacaagcattcaattcagtgtccattccactacctccatccccttccacatattttccatgtgctatattgtttcagacacacacacagacacacatgcacaaacacatataagatcactcctatgttctagataaagacactaaggacaccgtttacgtcactctgcccatggcaatgatgagcacagtattttcacccaatcaccgtactgacctttatccacagatgatgatccagcttccacccaaaactcctcaaaaacatactgcccttctcttttgaggcaagccgtatctctgaactatgatttgaaagggccagcttttggaggatggaaaacacctgtatttaataagattctttggagacacatgcatgccaaaagaacccaactccctcggaggctgttttgcctgtggctacattctgcagttctaagaatgcaggggggtgagaagtggcagcagctcgaggcacaagcacacctttaaaggcctggcattcaggaggtgactccagcgagctccaggtcaactgtccagccccatgcacattttggtctccactgaaatgcacacaaaatacaaatcgcactgctaattgcagagggcaggaacacgaagccaaagtataaaagcgagaatgatgactttctatccaccatgtccagcacgttagtgactgctttatacagaggcttcattgcatatttaaataattgaacaaggacataaagaatgcagcctagctgggagagaaaaggctgccttcagggctggtgctgcctacagactggggggataggcccttgaatttatagcccctagtgtgtttacaaaatgagggctttaattctcctattgttacagcaagattggggaaaacagagctctagggaagaacagggacctggggaagctaaggaagaaatgatttgcaggtcacctctcctctgtccaagtcacctcagccttcatcagtcccaaagacaagccagccctaaccccaaccaaccctccaaatttatactcaccttctcagaaccacagtgcccaatacaaaaatgtaacgcatcatatattttcttgctgttccccaagtttataatgtcattagtgtgatctatgacaggctggttcatagagagagcaaagtaataatataaaaaggaaatacccataacctgaagtggggaggggcaggcaagattgatggaaagtgcagttgtctggaggaatggcaacccagtaattgaatacctggagtgggggtggtgcatgggtggggagcgtgttctgtagctggatttgcttttttttttttttttttttttttttttttcacagcagggtgaaaggcatggcaggggtggtttggttcccttgggttggatcccaggaatgccttccctgcaagaagggaagcagaattgctgacaaagtaggttggtgatttccctccagagtccagtcggtgggtcaatgcccttggtctgctcctgtctcagggcatggggcttatttcagcaccaggggcaagcggcagcccatgagctaggactttctcggccttgccggctcttcagtcctggagaggacttgatccttttgataacggatttcatcctggctctgaatttcttttcaggggtgttggggtattaggggatgttgggagaagctttcaaacacagctttgcaaatcaaatagaattcattttgcctcctctgatcttacaactattctctggagtaggcaggctggttgaacttcaagagaagaggcgttcctgagagcctccttggtgagcttgcacacctgggggccagatgtgctttgccctccttgcaaagcctctctagtctggtgcccagagaatacagcttcagcagcagctcactttgcttttcagtttagatgagaaaaaacagcaaaatagtccatcaaggacaaattcttgccaatggatttgcttttgcaaggaagttcacctttgttcctcaagcatcatctttaagtgtgaatgcctgatgggaggtccaggttggcctgtggaggagctggggatggattccaaaaccacctggggaccagtggctgctcctgctcagtagaggggtgggcatggctttgttaatggctacccaaggctctggcagctgatctgaaggcccagggctgttatcataatgccatcattagttgaaacaaaatcattctttgtaactggaatatagttactataaacaacatatgttattgggcattctatttctaataattgtaattatggtagaatacttgccattaatataataacaacaatgattgaccagttctctgttccagtccaataacttcacctgaacgcattctttgttcaggaaaaaaaaaaggtaattcaatatccctgatagtcaacaaagctactgttgaaatggaagacgcacagatgaaagcattcctgagatgcaagatggtgccgggtagatgaaaagccacctgtcagcctcactgttagctaacaaaaggacactgtctgcatcccctcactcaaagggtaaaaggaaatgaaaaccccagagatttgcagaagagtcaccagggcctgggtataccttcattccaagagagtgggccttgggctggacgttcagtggaactgcaggccctgagggtatgggtcaccctgttaggtaaaggtggtcgacctaagccttgacttgacactcactctataatcgccagcccccctgaccactttttgggcatggatttatcttgggggctttccagctgctttctacttacaatgacagaactttagagatgatgtagaccaaaggcctcattttacagatctctaaacacagatctccatagatcttcttcacctttaaacctctcacaatgccttgagtatggttgaaatgcttagggtaatgaagaatgaagagttaaatcataacaaaacttcagattatcgtgctgtgagtaagctcttcccctagagtggtgacaggacataggtgtctgggggcttccacaaaatcaccttttaattgggtagtttttttttaccccctactcctgctactatatcttcccagaaaaatatacagtaatgttccacagagggatgtttcagtcaatgacaaactatatatatagagcagaagtctcataagattataatattgtgtttttaccatgctttttctatgttcagatgtgtttagatacccaaatacttcccatcgtgttataattggctgcagtattcagtacagttacctgctgtacaggtgtgtagcctaggggcaataggctatgccatatagcctaggtgtgcagtaagctacagcacataggtctgcataagtacaccctatgatgttcgcacaatgacaaaattgcctaatgacacatttctcagagggcatccccaacaataagcagcccatgactgtatattgctaaaataagtacatatagaatgtaaaaatatagcaagcaaaacaaaacaacaacataaaaaaatcctcatatttacactagcagccaggaactgtcttttgagttctgaggacaatgacctcctttcactgaccccaaatggctggagtcagtcagtagtccacacatacttctttacttgtttcctctttgccacattcactaggaagatgctacaacaaccatcgccaggtggccaactctggttcacctctatgctcacattcaaaatggccctgggattgagctgggtagaatgcagcctccaaacctagaccagaagctccccattagagcttccttttcttagaataaataaacatccaaggtaaagaggagccaaaatgtattccatgtgataagggaggcatgggcgattccaaactaccccagagcccctccctgccatggcctgccaggctcaccatactatggctcatgggaaatggagaggatttcagtatggcagcaagagcttagtacatacagctccatatccttctctcggccatttcctccagactaattcctttctccggggccctggcatcccatcctctgagatgctgtgaatccccagcagtctttgcttgtgtcaggtatagaggggtttcccacctggcttggagtctgggtgcttgaagccatcattcttctaaagggatctctgcattgccctgggacacatggtgggctcttattttattcttttttttttttttttttttgagacaggatcttgctctgttgcccaggctagagtgtagtggcttgctcatggctcactgcagcctcaatctcccaggctcaagcaatcctcccatctcagcctctcaagtagctgggactacagacaggcatcgccatgcccagcttacttacttacttacttacttttattttttgtagaaaaataaaaatatttttctattggggagagtttactatgttgtcctgactggtcttgaactcctggactcaagtgatcctcccaccttggcctgccaaagtgctggtactaccacgcctggccttattttattcccttctggttctttttccctctttctgagcaacagaaggaggctcctcttctatacttaaaagaaagaaatttggtacaagaagagcaaacaagaaagaaaaagcagaaatgcaaaagcttcttgcaaggtaattaaatgattagaggccttcaaaatccaccagctagctcaattgtttttgctttcagtttactcttgggcctctccgcacatagaacctctgccagatatggcagtctggaaagctggagagaagctgaggaccactttgtctcaactcccatcaagttatttgcaggtttcagaccagaacaagaaaaggattcttctcacatccctgtccccagccttggtaggtcaaccagtccttctgctcctgaaaccacaccctgagacaggcctggccaggctgatgagactgtgcagccttttatcaaggacatgcccttgctgtctgactcacctcattcttattacctttatatccatgttgtctttgttaaagtagagaactgacacataagtatgagattcacactcttacataaaatccaagatgcaaccactctcctccctttccctataaagggacaatctcagccagggtctcttttcctgactgtgaatccatagtagctatttccaggcatgaacagattcccacagagagggagttggttttgtgtctgaggcttccataatctcttcttttttctgtctgaaacttgcaaggaacttcatgggagctgagacaaaggttttcagcctctctccagctttccagactagtgtatctagcaaaggttttatctagcaaggaggtccaagaataaaatgcaatcaaaacatttgagctatgtggaggcttccaaaggccccaagtcatttcattatcttaatgaaggttttcaaatttctactctttctttcttgtttgctccccttgtctgttactcaatcaggatcatcctctctccagacaacatctccactccttgcttttacttctaaaatcaatcaccctgcttactgtccacctgtagaactcctgctcagccatcaggattcgggcaaaacgggatttgggccgggattttctgatggctaagcacagtgcagtcactacccaccgtgctatgggagcccccatgcagcaggtgttagtgtggggtgtacattgaccttccctttcagcctcatataataaacagcttctctcctcccatgagggtttggccaaaggtaggattcttagtggggtatgagtctgggatggggagggcacttgatgggcctgtgtgttctctcaatgcccctcctgcccccctccccccaccaaatcccctatgcttcctgcacctggacaggtcccttctctcacagctgtggggctggccacatggtcatgacacctgtgtggtgtgttaaaggggtctgaaagatacacgcaagactaggggttgcaggtgaaggtgctggagcctgctgagtccaatattggctgagagagtgcaagaaacactgtcatgtttgaacaacagaattttccagaggtatacctgttatcccagaagtccttgcccacactctgacattccaagacaggtaacagcataggcagaaagtatttttggtacagtgaggatgagtgttcaagaagaataaaaattcagagggaatagaaaagtcacattttagccttagagccaaacagtatctcagcgattcttcaacctggaccgagcatcagagccactgggagggcctgtttaagcccaagttgctgcaccctgcccccggagcttctcattcagttggcctagggtggaacagaagacttcgtgtttctagcaagttctcagctgatgcagattctgctagtcttggaaccacgctttgaaaaccaccgctctagctcacaagctgaccattctttcattctcatctctctcccttttactcagcttgccctctttgggggtctcacttctcctctgtgaacagtgccctgaggaacagctgaggagtctggacacagtcctgctgtgtacttacaattatttctaggacacaccaacacacccatctctttggaatctttctaggacccacctggtgtgtggaggatccttctggttggagtgacctggaatacacctttgtctgtaacagaacctccagggctgatccagaacccacagtcccagcacagagcttggcatatttcctgtttttataaagtggacccttaagagccaggaagaagggggtggtcctgcacagttttcctttggtttctcctcttaagggaatgcctctcttctgtgtcccatgctcacaacaagagacactcaccactctggctgccagggacctacctcgggcagcttcactcggccttcctggaaggagcaggtcttggggtcatgggtgcagacatgccggtatttacaccagtggcagcggtatggactctccacgcaggacaggcacctgggcacaggggaagggaggcacaaatctaagaacctggatgagcccaaagcagagggcttgagtctctatggtctagcaaaacatttttagtattaagagaaaccaccgttgaatgtgcaggaagggcagatcttatgcacatctatccctttactccccaagacctcaggaagctaatggtctctggtttcctccctttcccatatgtagctgacaaccccgttcccccaaggccaaattagccctcctccatctccatgggataacatcctccttttcaaaagagggaatgataaggtctggagcagagggcttgtgtagacagacctaagagttggggcaaacaaaagattaggtttgtatgcaaattgactccgggtctctgctgctgagaagccacctgcaccttgcctcaggaggaagtgactgaggctgctgtctcactacgatggctcctccatggttggcaaccccacctttcccctttaccccaggaaaccaagacaattttataagagctcctgactccttaaaagcccaacatggttcccttttccaaaaactcaaatgcctctccatacaggctatgcccttcacggtatagatgaccactgcccccaacgcaggtttgttgctttggccacgaataggccacactctccccacaagccattcctccctccagagcaccatttcttctgtcctccacctgactacctgcttgaccaaggaagagctggtcaccctgggcccttctcccgtgaatctcttggctgacatctctcggacagtcctggccatcttgtgtcatatctcaccattacctgtccagctcctctactagtctgtaggccatcaactcctggagggtaaggattgagtctttgtgttgcattgatttttgactccactgtgtctaatgagcaacacattcccttgcacatgggagatgcttaaaatcattttatgggcttaatgaaagcttcacacatgatttcacctatttactctgcttccccagaggggaaagtggagggagggattaggccaccgagtggtaaagacagggacagctttgccgcaagaggcaagaggagagtcccagggctagagtaactcatttttggctgggagggccggatgccttcttacttggggccccaaagagagctaagctctagactcacagctgccataagcagatcaatagaccctaaaattccaccagcctagatctctggtcatgtcagctacctatcatgcatggagggcaaaacaggagtatgttaaaacaagcagggttttttgaggtcaggtcccacggtttgctctgtggaactctggggatcccatggagttcctttggagaatgtgtagttttgtggggcttctgtggagaggggttccaggccccccaacctttaatcagaggagctcctgcttccatctattctgtatattgggcatccacacctactttcagtttaagatttctatggtgagaagaaaaaaaaggctggcccattcacaacctggtccaaccccattatttgataaagaaaagataatataataatggcaagaacacatgtggtgcctaaacactgggccagacatggctgtaaatgcttctccttagcatggcccttttaccccttgtggctgtcctgcagggtaggcagagccgatattcagagctagcagccagcacagggtgccagccagtgactgctcagatgggacagtgctcctgccacgtcagttggtaaatatttgtgtgacgcccttggaaggagcactgtgatttccctgttgatagaggacactggggcacagaagggttgagcttctcagctggtccggctacagagccagagcctcggccctccccacctgccactggaagttggatacttaagtcaaacaaagctcgagttggagtcaggcttcctgacccctaagccagagtccgcccccccccacagctttctgcctccctctggcccttaccagcctgtctgcactcagcctgggcagcctgtggggagctgagcatgcaattgagtggttagaccacttgccccaatcctggacacacactggggcttctctccctcctcagttcccttctctgcccatggagcttgctctctgttcttcatgtgggatgcaccaccccacaacagatggtggagatggaattgagttagaaggattgatgtcagggaagatgtatgcgctagggatgtggagagccccactccataagttctcattttctgctcttctagtctctttccattaaccctgtgggtaccagaggagagggagtgagggaggcctcctctggggcttctaaatggtgactccctgtgggtaccagaggagagggagtgaaggaggcctcctctggggcttctaaatggtgactccctgggaatagtgatggggttttctgatctttggatgaaacttgaccccaggaacgggaagtgggtaaggctggggccacttacgaattgtggacgctgcaattgtagaagacaaagctggtgctggcgaaggtcatgccggtctcctttgatttgagctgaagctgtacgacatggtggtcccctacaaggagagatggctgaggggtcagggaatgctgaggccccaagccagggattccctgaccagtgacacctgctggaaaagggagcctgctccccaggcggctgttggcttaacagggctctgactcagcagacccagtcccaggacaaccctgagagcagctgcagagggcagttcttgtctattctccctgcccaccgtatcacttccactcttccatgtgtacacacacagatgcacactgccagggattcaaatgtgcatttgcatgcatgatgtcctgcccagactcacaaaattgattcataaccaggagaaacacatatgtagacttctaggaatctaggaatgctgccacaaactgcgcaagaagttttgcatgtatgtgtgtgtatgcatgagctcattccctgtctctgtaaagagagcccctgttctgacaccacttcctctggggggctcagggctccaccggggcgggagaccctggaatcctcatctggtgccagggaggagctgcagcccatgtttaattcacagccctgaccctaggcccccacttcaagccttgttctttgccttccctgagagcctcattaatcaatcagctctgaacaaatgtgacaagcacaaatgggagggacaacatggaatcaatctgcccaggctgggcctgtccctcaccagcatggagcctctgcccactcctgtctttcccagggcagcttgcccccaacaacaggcagctctggggagacccggtagggcagagttggggaggcagtggtccagggtcagagatcggccatgtgagcatccctgctccagctcagtggcctcctccactgacccgccaagccagtggtgcaggctgaacttaaccacatgttctgctgctgtcctggcctgcccctccccaccctctctgcagctgttccttgcccaggatgagggtgactcttgggggctaacctggggctgagacagaagggctgtaacagtcaatgccaagggcaatggagggagatcccatccccctcttcccataacacacccaccatcccatgccccttcctctgactctctcctgcctgcaggttgctttgatccccccacatctgtcctgagttctccttatctagccaggaggaagaagtgccactcagctgtgcctccgggatgctcaccattctctgtgatgatccggggcacctccttggctgcaggggagtagcactggatctgattgcccacgaccagcccatccatctctgacaggtcctcaaaggtgcagttgacgccagctgacagctccgggacattgtacgtctccaggaccagctgtgaacagccaggcggggggagagaaggaggagggtgaaatgggaaaaggacaggtatggaataaaaaaagaaagtgggagagtgagagagatcacagggaaagcaaagacaagcaagaggcaatattaacatggagaagagactcaggttattaggagagtggcacagaggccgtggtgagatgcaaagagacagagacaaaagaaacctcattaggatggaaatggatttggccccaggaaacaagaatgcttaagggatttgcgtggtgccattttgatcaggactgaggcatggctgatggagcacctcttccattaggcccaattttggaaaaatagaaacaccaaccaccaagtgctcagtgctggaacttggaagtcacctgtgcccctttctctctctgtacatgcatctttcccattttatagttgaagatatcattcccaacaccctttgtcattctttgtcaccctttggtcatttttggtgatggtgctccctgtctttctactctttatgaatagagcctcttccccaatagtcctgtccctgtctccttcttgcatccccccgtagacacttaattctttgatatcctgcacccttctcttgagctgcttctgctggccgggcttggcccagtcctccagaggggccttgggctaaggcactttttagtgaggggagagttttccttgcatccctggaccccaccccaacccccacgacccttaccagcacgttgtactgagagacggagatattgttgggatggaccgtcagccggacacactgcttcatctccgaggcaaacctgcggggctccttggaccgctcacaccgctccttccgggtgcaactgggaaggacataccctcgagttactcaggagatggccgcttggtccagggaggggcggatgctgaggtcaggtgtttccagcagctcccaggatgtgtccaaactcaatgcgcccagagctaacctttttgtgtccttcctcaagcctggtcctcctccatcattcccaaatttagaaaagatggcaatttcaatcacctcttgccaaaggcagaaacttgagagtcatcctaactcccctcatcctctccaaactcacataaggtgttgcacagttctgtctattcaccctctctgcacatccttagcccttgccattctcttctcctccttaggcaaccagagatttgttttcttcatatagaaaatatacctccttggctttgaacatgccagttcttctgctggacttccttttcctcacttctccacctgtccagttcctactttttcttccagccatggctcaagatgcacctgcaatctctcctgcccaccctaggcaaagtgaagagcttcctcctatgatctcatagcacctcggagtctcctactttaataagtctggaatttcttagattgtatgacaattattgggctaagtgcagtcctctcctgccaagtaggagcttttcaaaaaaagcagctatgttccatttattttagaatcccctcatgtaggcaggtgggagagagggaaggaaggatcaaaggagctaagaactgtagttaaaagcttgctctggatcagaatcctggctctaaggtttgctgttactcttcagtgctctgtgctgtgtaaagtgtatggtgtcacaagtggaccatgtccagtgtgacctgggatcttgcagtcctagctgatgaaggtttgtgaaagatgcatgtaaaaaacatggaactctcctgaaatgcaggcatcacttgaggtcactgcatggaggcatctgaatttcagggagcagtatttaatccaagtcaggtgaactttgtggacatggggcttcaccaagtggtcatgatttggaaactctggactacagattctgttgtggggtgggggcaagcagggtcctcaggagggacaagacaagaggagatgagacagcagggaaatcactccagagttgctgatctcttttgattaaagagaaaagattttgcagaggaaggaagatgtcaggagctgttgcagggcaggagagagccccaggcaaggagtttattaggacacagaacagccagggatagggaatctacatggggagggagccttggggagggagccttggagagggaacgactgtctcaggaagcagacaggtgtggtgtggggcaaggagatgagggaagggggtacctggacaccctgagctgctattggggtaactcaggcttagggaaagctatgggggtttctcctcctaacctttggccacagcaagaggggcagcctgggtggagagcctgagaggagaatctagcaaatgaaggagaaatcattgaaggccatggactgaagctgtccctctaaggatgggataaatggaggaacacagggacagaacaaaggacttcagagtagattggatgtgcaatgcgaaagtaaaaaacacccctgaacagtacattcatggctgcgaggtacaagtgcttattaataggcacatgatatggagtttacattgtctagcgtttaagtctcataacaatgctgcaacaaaccccaccttgtcaggatgtgttgggacaaagacgcaccctgcggcctgtagagcctacggagctctacctcctgaagcttccagactgaggagtaaggggcagaccccttgctgcagactaagctggttcttctcgccatcctgatgcccccttcatatccttagggcaattcaaacattttcccctcaatctttctgtctaggctaatcgctatttttgcctggcactgggaagcactttgagtgttattgcaacttgttggacgaagataaattctccagggtgcttctagaaaaccccctcccaggagtgaaggatcaggcatgagtgtggtcacccccgtggcacttccttgctgctccagctgaccgatggcaacaagagcgtctgcctaaaagacttggaagttaatttaccaggccagctcctctgcgaggactccattaccttcagccattaagctaatgttatggacttttccagagtgtctgcactgacatcgctattaatagtgttattactcccattaacagcagacccagagagctggtacgggcttaaattattcactgactccccaactttgaagttcctatttctaagagcaatcagtaggtctgaaaaatgtctttgattaaattatgaagagagcgaaaagcagagctgtttccaggccaaacatcacctggagttaccaaatagagattcagatagaaaagacaggactctatctctcttccaggggtagggaggaagaggtggcacacaggtgtttgctcgggggatctcaggacaaattctacctgcattgcttgctgcttccaaagttcatggggttgcatcttgccactgctcctgaaagccccaaagaaactactcatcatcttcccccaattttaggttttatagggaagccacctgtaatttacaattttaaacatcactgtataatcttgggcaaattacttaacttcttggtgcctcagctttctcatctatacattggggacaaaacagtacctacctaatacggttattatgaggattaaatgagattatgtgagtaaagcattaaggacaggacatagctcatagtaagccctcataaatgttagctagtattatcatcttatcctttctctgacatcctcatttgacctctccaaactgtagctgatgcagaaccacagatttattttattttttatcttatttttagaatgagtgttttttatttttattttttgagacagagtctggctctgtagcccaggctggaatgcagtggcgtaatctcagctctctgcaacctccacctcctgggctcaagccatcctcccacctcagcctcccaagtagctgggactacaggcacacaccgccatgcccaactaacttgtatttttttggtagagatggggtttcaccatgttgcccaggctagtctcaaactcctaagctaaagcaatccactcatctcggcctcctagagtgctgggattacaggcgtgagccaccatgcccagcccagaaccacacatcttctccatgactggcccttggggcaaatcaaagacaaaagaaaggcacggctgcagcagttttcctcctaataaaggagaaggacaacccagaggccaggagggagaaaagagcgaaagaatggtctggatcatagctctgttttcttactagttgtcaaagggtattgagaactcagctatcttagtggaaagtcaagtgtaaggtcagagccagggatgttttgacatttctactatcctccaggattcatgagggtggaggctacaaatgtccaaaagcacagacaattgaccttaaatgtgataggataatggaaggcgaggcacgaattcctgctggtttcttgtggggtctgtcaagggaatggtcttctgcttttctaggactgcaattcccaacagcccagactagatctgggaaccagagcaaaatgttaattcacgacctgagaggcaggggtagtggcttagatgtttcattccaagaggcctcaggtactcctaaagcatgtccctcagctccactgtacaggccccttgacatgaaggaatcccctgcttcatccatttcccaggtaggaaaactagagctgaaaacggattcagacagtgcatatactgtgtgacttggagttttctgacattcttctctgcatgccagtgtcacccccgccccaaatgcaaaccttcagatggccagcaggaagccgaccccaagaggacacaccagacccctagagctggagtccctccctgctaacctcttctgacctctcttcctcattccacttctctgcatttcatcttctccagcctcagatcaaaggtgcaaaaagcccttggggagaaaggctctagggcccctggaaggggttattattcaagccagtggttccaatgagattatcctctctaatgaagcagctacctccgccctcccctaagcctgaactttcactgctggagaattcccagccaagtggaaaattagaagggagaggaatgaaggaaggaagggggtgagggagagggagagaggtggtgattaagtcctctagaaattaattcccaaatacagcgatagaaatattaactcccggtgccgctggccaggcaaacaaatttcaatttggaaacagggctatctgtgagtccagcctgagtgaaccgccaagcttggaggggctgttgctgatccatctccctgggctctctagcatgtgtttaccaggcttaggcatcagaacttgctccctacttctccctgcagatgatccccaatccttaacatttcacatttgccatgacctatgcttaaggtgcaccatctgtgcttagaattgagaagattgaaaaagaaagggggtaaggatgagggccttccccagcagacctaatagaaaagttaagataatttagaatgcctactcacctaggagattattggaagctttggtcattgtcatcacatctggggaccctgacaagggaagagactagaattcctaattcattatccttgtcctccttaagaatgaccacagtaatggatagatgcatatgtgtggcttggaggaagtggagtagctagtataggatccttcctaggcaggtgggtgtgtaagaggtttcttatatgtaggggtagatcagatgagtcctttcaatgttacaattctaggatccaatgactgataccatggtctcaaggaagttgaagtatttgggttgtgccatgtaatacttaggatgaatcccaagataggaagcccaaggttctactgtaattttccctctgccatcagttgctggcaactgggcccatggtcctttgccatctctaaagatccaaaattaacctaagaagcagctgaatcagatttacccatgcatcccctacagaaggagggcataggacttagcagaaaccagcaggttcaggggttgagtggagacccaagaacctttctgggcttatatagcaaccaaggcaacctgtcccaccataatcagctcagatgctgggcttgcagccttcattgagaagccatgttctgccctgggtccctgactggattctgaccttggtagccatgctttgaatgaacaatctattgaacaaaaccttaggtgagaggtaaaaaggacctgtaaatgttcgtttttttccagatgatcccaaaccaaaccaaattacatgtagcagctgccaaaagagaaagtgaagtgggcttgtctttctcttttcttcatcagtggctagctctattagggcctattaattttctactaaggttgaggagaggttaggaaagaacaggtgtggagcagagcaggagtggagggagggagagggagggaacggcaggagaagggaaaaaggaggaggagacagcaaaggcatcgccacaggtgaatccattctctttctaatccagtcggtaacaaggagaatgctgcctattacctgagacacattccaacaatgactccagttgattctcatcaactttacactatactttatccaacagcctggtgtcttcatgtccattaacgtcaccaagtccagtaggcttggtgcaggggagcactttgctctgtgcaggctgggctgctccatcctatgtggcccagtgcagcatgattgaatgaagtgtgtgaatgctggaatatgggtgtgtatgtctggagtgaagcctcagaggtaggccagctcctctggttgtccacaggtatccaagtcaatagactgggagggacattgagagcttgagcagaccacagggcttttctaatttatatgggaagatggcatttttgacttaccattctctggtcatgaagcatgtgttttgtgtgtgtgtgtgtgtgtgtgtgtgtgtgtgtatgtgtattgggggcttggcggggggcagggttaaaaaagaaaaggcccatttccttaagtcatactatgtctctgctaagccattggagaggaaaattccaatgtactagtatctgatctagtctgggactcatttctttggaacagaggctgatagctttttggcaaagagtcaaggaaaatctccttgcacagactgcaaagagtttgctgggtggaagtggacaccaaccattcctcatgactgtgtaggccttgtgcaagcagccctaggagagatcagtgaccagcagattagtgttaagtagcccttgaatataggtttaaaaaatgagatagcaaggctgtgggatgtgcctcagtgaagcaaggcagggcttgcattttgcaatcagcttgtgtgtcattaagtggacattggcatggctggttgaagccttccaaggggaggaagacttcccaacagtgggctggctccagcaccagccacagccctccagtcctggggaggagaggaatggaaggggagggggaccaggaggaggcactgggatccaactccagcctctgctcccacagtcgaggccctttgggccacttcaggcatgaggacctgctgcattgtaggcccagcgaggggcttcatgcaggtcccctcccttaattttcatagcatggctatgaaattagagctgaagaaactaaacccagactgggtctgttcttagacaggtcctcagttgtaactaagttgtaactcatctcttctgctctgaaaagcagtgtctttcttgtctttccacttgccatcttggaagaaaccatatagaaaagaataggagtgactcttgaaaagtaacccctgccaacctatccagaggagggcattcttccaacagaagaaatctgggaagaggcagggtcgtgagggggtgaaagggagactttatgaaagctgatcttatccttcccctgtgatgtcttgggttacatgagcctcccaggagtgatgctgatgacttttcttaagaaaggtaacgcctgggccaatcgatgcggctgggtctgctgggcaggatcccattacctgctgagactgagacaggcttctttgcctgggcacgaagccatgggaggggaagatggagagggggctggggacctgccaagcctggtcactggagaaaatgtttctggcccaggacaggagatagctgtgatagggcgaaggcagggtgggcttgtacgctttcctttaccttcacccaagtcagaatgagtcagctcaggaacaaggaataaaggctcaaaactcagggccacctcaatacttagcattgctgaagctgtcattgccatcagagatgggcaagcctgtgggccagggtcaggggctgcaaaagagagcaactgagtgaccctgtgtgctaccaggttggcaggcgagtgcttcatgacaattgagagtagcaggagagaggatttaaattacacgagcctttcttaagcatgttttgtgcaacccacctgggactttgctgctacaaacagcccattcagccacatgagccacctgtttacagaggccctgaccttgcactgctcaatcacatgtgctgactctcaacccctctctctgccttttccttcttcctctcttgctgtctctgtctgtctctgtctctcatacacccatctgctgcccttctcttccacaatgctaccaccacctcactccctccaaccatggggaaagttggcaaaagtgactgagaaaatggacttctcttgacacctcaaggaactcttttcctgccgtcctggtcttcctgagtgaagatcaggcttgttgaggccacttagcaagcaaccgagtcacttggcacagggtcttgcccatggtgggggcctaacaaatgcattgattctagtaaactcccactgtgaatccaaggcctggttccccaaaatctttagggcagagatgacctaacagagtcgccttcatatcactgagcctggcacactgctgggcacgaagggagaagggcaggtctgagagatctacggacaaatttgtgagtgtggacacagcactccttggaagcaattaaacctcccactcttgccacctgtctcccttcctagaaaatggatgcccttcagagcaagcatccataggctctctctggctgccgtcaacctcctgtactgaactgccagcccccagccttctcctttctctcctgctgagcccacttcctcatgtgtctctccaagccatggatgtccagtttactcttaagaaaagtgaaagggagggcagatcaggaggagcaatatctggctttgacctgaacctgaggaactagggaagaaaggcccactgggaagaaggagagagctctctggataaagaaagtgttctatatcttgatagacatgtggattacaagcgtgtttgtctttgtcaaagctttcaagctgtacacttaagatctgtgcatctcattccatctacatttaaaattgtacctttattaaaaatatcttagaaatccagggacctactctacttatccaggaccggattttagaacctggatttcaggacctcagaaatccatacctgagggatttcagactttcccttaaggaactcaaggactcattatgcctcagactgccactcagagatggggagggtgcctgctcttgtatcaaggatgtattcgagtttaagagggtatttttagcttttagaggcactcttcgcaagggagtgggggaagacaagattttacccccaccttcttatagttgccagggggctctccttggtcataactctgagagggagggaggatggatttactgagtgcctcagcgggcaggcagccttggcctatgggggctcttgagctttgtcctggaagagttgggctttaccagacacattggcacaaatttatacctgtgtctgccttcctcaggtcacggacataaccaggaggctcaaggttacgaatgacagcaccttgccctgacagagcatcttggaattctgtaacatcctatatcaatcacctctttttatcctcgtgccatcactgtgagaaggtaccgttctccctctttgaaacaaggatgccaagtttctgacatacggagttatcgtggaatctatttgcaaattcaagtaactgctaacgtttatttgtgacaaaaatcggtacccgtggacacgtacagggcagtgaaaaatttgagtgatctggcacgcacactcccagctgaggtgggataaggcagcctcagcttcttgttttagctctcgctctatgaacaagtgtcctcttcaagccctatttcatgccacatttttctcattttgcaggtgattttgccgcttaaaatagtccccgaatgtagtgctgaaggtctgtctagtgatcctgagtgcaagaaggccatggtgtgccttatggagaaaatagctgtgttggataagccttgttcaggtatgtgttatagtgctgttggcagtgaggtcaagcttaatgaatctattatatatattaagtaaaatgtctttaaacagaaacacacacaaaacaaggttatagatggatttgttgatgaaaatgtgaccagaggctcccaggaacctaaccctgtatttctcctaggagcaatggcttggtattcactaactccgtgttccagcgactttatggaacatatctaccatgtgcaatgagaactgactgcacttgtttaaagccccacaacaagtttccaaggcatgtgaacttgagtccactgatttccactccagtaatcttcccagtgtcccccagtgcttcaatgcgctggctccactgtggctccttgagcaacgaggtgccagcagcagcagcagacaatgatgaccacaaagacaacaacacttgcacagcccctgccttctgagagcctgtgcttaacaagggctggtgctacatggaaacacgaataagatatacaagtgtcagaataaaacatggtgccagactaaaggggtgaggaggatctagcaggagtacctgccacttagacaaaggctgggaaccccccaggaagagaagcatgcagttacagtagagccatctggaaaatcaccagggatcaacagagtcacaagaggggggggggcacccatgagctcacagtccttccccagccttgtcaacattcctgccccaccctacactacatttcccagtgatccacagctcaccagtcattggtcctcataccatctcatttgattccccagtgactcagtgaggcaggggagacaggcatcaccatgtccaattcacagaggaagagctgggatgaggagtctgcacttgggggcaggcgcccaaaattcatgtccatggctgtttttatgccatgctgagactggagcagctggcttccccgtgcaggctgagggcccccttcatgaactgcccagacttcaccttggcctccatccacccctgttttcttccacttgacaggaggcaggtatgatgttacagaagggtaaactgaggccataaaggaagtactgtcttgtgcctcctcctctcatgtctgcttaccttgcagccctgggggtgggaggtgggggttctcacagtctctctggtgccttctccaagccttggagcccctctgttcacagggctccgtgctctgtggggctgggacagcattgtgggcagagaccaaagctgacatggaaattgccactgggcatggagtgtcagggagggaccagattttccgattgcctttgaattatgccaggtaggaaagccccatgccaggatcgcagagctatcctcagccaagcagaaaacagggtagtcaaggcccccaagtaaggcaatgagtttagagtacagtcccttcctcagaggcctcactgggtgacacaaagaaaactgccccctgtctgcctggcaaggtatcattcagggaacaattctggcctgatctgagccaatctgcattctgaatgcaacctctgccatcctcttctatgctggccactcctaggctcccctgctctgttagcatgcaacctttctatacacttgagtgcacagtttctgatctgtctgtgagttatgtatgtttcagacaagactgggcacgttcagggtggcacggccatagactgagttatgtatacttcagtgtagctcagtggttcttgacttttttccactgtaacctacctgaggaatttcagaccttcccctaaggaactcaaggactcactatgcctgagactgccacccagagatgtattcgagtttaagagggtgtttccgaattttaagggcactctttgcaaaggggaggggagaagacaagatcctgccccaccttcttatacttgaaaattattggtaaatgtcattggtcacatgtagttcaggttcttagtaggaagactaaggtttttcttcttaatttataatgtctggatccagctcacaaagtggcacatttcaattgttggccagaaacaacaatagctggactggaatcaaatttcatcagagtgaggtccaaccattcgttggcttctccaggtattgatggcaagggtcttcggatccccaaagaaaagccttcagctttctggttgtctgagccctattcctgccctttggtttatttactgtttacctccactataatgccattgccttcttccctcttctgaataataaaatggagccacacaaaaggaggcacattggcaagaggccagcactcaggccgggctttattggcccagtgactccagcccaagtgcactcacagccagctaatgggtgtttggcagcagtgggagggtcctcaggtgctacacacttcaactgcagacccaaaccagaaaatcctttggagctgttgaagtagatgttaaggagatgtggaatcactaaagggacagcatatatcttgtttatgatttcggggccagtaagaagctacagaaaaaaagatccaatgcctttttcctggtgttcagtcctggaaagtcagtctctagcccagtaagccacagtcaggaaagtccaggaatcctgcttcctccagccctccaatgtatgattgcccagcatgacaactatatcctgacctgtcatgattcccatgccaccgttgccatatatttcttaagggaatttggcaaatttaaagggaagtcagaaagaacaaaggaagggagataacatttggaaaggatgcaaggaaggaagagcaagaatagctgaggagaaaagacagatcaaagggaagggcagtgatgacagagaagcagaggaagggaattaccaggaggaagtgggaggcacgaggcagcctccccatggtactcacgtgttgtgcagcacacaccagccacagtgggggtcgcctgagccaaggcactcgccgcagctctgatactgaccacaggactccacagggactctggtgagctaggacagcaggatagggagaaggtggtcaagattttgcagaacacccagcagtgtaccagaagagatgttgctctaaatatcaagtgtatcacctgaaatgttgcaggagcatgaaggtgcttggagcccagtgtgggaagggaacttgagtgattatgtttgagtaggtggccacatatgcatccagggagacaagcagccatattattttcttagcagtctccatgaatacagactccatacagtccatactaagttgtcagaaaagatatttacacagtgttcatttcaagttttctacctctgaaaccaccaaatatctctacaaatggccaattcatcatgtatttgtttcctatcaatgtaacaagtgcaaatggtcattctcactctctcatggtttctctttttctgtagtgtttccccttctttccagtcctccttcaagtttcgtcatttttgctgctccagagagcatttagtctgagaccaagacccttctctttctcttcctccttgccatttaccaagatatcataagctcactctgtagctgttacttgcccgctctttctttctcataatgttggccaactggctctaaaagctttcactatggtgctttcaaagagcatctgctgctatttctcctcctacccacactcttttcatgactagaggcttcctctccaacccaaaactttatattagctttcaccagccgcctgctaatgtaaaatgttccacatgacatttttgcttagcccaaatgcttccatttcctacatgctcttaaatatcttttgaatttctttgttctccaatgtagctttgccttgatgtctctttacataacttgccagcacttgctacatagtaggtatttaataatgatacactggatcaaacggagtttttattttctttttataaccttggtctttattctccgttttgccggtttttttctttacaaaaagtatttttttttttttaattttacatcatcctcttccagttgggatacctttttatctcaatggagaatcctgcctgatgtttcagcttgagctaagagaatttgatgtggccatccttttaaatttcttgccatcatacaacaggcacagaaaactataaactgtgctgacctggctgaaccctctctgttacatgagcaaatgcagaggcagtgtttcccctgctgttttatggggcatgtgcctctgtaaaatgatgtctgcttggcaggggctacttgtaactcacgcacaggcaaactggcaccagagcttctcaattagtctccaactctcttttggaattaattaataattaattccaaatcccacatgatctcttttcccttaactttcttattccctttatgcatctttttgttctccaaagtacacactgagcgttcttaatgaccacactgcgctttcacttctttcaagcaaccttttagcttacctctcccattctgacggcagtgaccttgaccttggtggcccttcctccaccttctcagatgtcttttttgcacatttggaattttatcttttcttttattactgctcatgtaatctgcatgagccgtgcctggagtctgcctacatatgaccttcctatcctactaattaaccttaacaattagttccttacaaattacccacactggctccacaccagccaagaatttgccctctttctgttgcgtctttaatttctcttcctactccttaagtgagcatagacatgctagtcatgtaagcatataaatagtggctcctaacccaaagtacctggactcctagtaattcatgagtggtaatgaggtccacacgctattttcaatatttcccaaagcctaatggcaattgaactgttgctgttttatgttttttattcatactcagtgatgtatgtctcatattaaaaataggaaatatgttattacttaataaatgcagtttgtttagtagacagaatctttcaaaacataatgcacagagggaaaaaataataaaaggggccataaatggtgaaagttgggaaacataagtacacaataatgttttcatatgttccagctgcttgtctagcactccatattttgcataggcttaaacagaaaatcatgccttgctcaatcaaaagcattttctcgctctaaacttaattaccatcctcctcagtttctcctattgacaagttctataatccaccttggatggaatgtggctgcatgttctggaatgttccacatcaagtcaagagccagctgcttggtgaatctgaaattctcaaaaacctttgcattcagattcttaaaatattttgaaactggtgtttaataatgtccataccctggaattgtcaagtccctcctcctgattttaaacatgagtcattttttgttgggttggaaagaatgcaagagccctcagagctaggttcaaattctggcttaacatggagataaaaatccctcctccccacccccaccccaattcacagtttcccaaagcacagatgatgcaatggttttgtaaatggtctggcactttataagtgacggctatgatggatcgctgctatccttttcattaatatcccaatcctccttgtactgtcacttacctctccccgacatcccagaaaactcctctgacagtcttccaaggcttcaggaactctgtcaggagttcaacagacctgggagaactttttttttttagtaccttgatagtgtcatttcctccttgagctatgatatttgcccctaagccattcattgctccacactttggatgaaacctggagttatctcatttccaggacttattcactatctttattagcttctggaacagctatctgcttttcttagcttttcatttaggtgggtccatgtgagacagggacacaagtcctgcacaggtattatgagtcctgggttccagccacagctctgccccccagtttcctgggtaaacttggacaagtctctcctgggcttctttgtgatgatctgaaaaatgaggaactgggcgcgttaggtctgaattccctctcagtcctaacatcctaagctccttgttaatgctctgacaaagtctctcaggtcagcctcatctcacttgtttggttttcatggacatgtataacaatggcaccaggtctaccttcaagaaaactttctcttgaagacaatcatctgggcagctagagctttctcatcttaaaggtaaacaacccaactgcctgtagtctttccttacggaatatttctatttatgatttaaccattttttatgactctcttctgaacttgatctaggttctctccactctttttaaagtgtggacattcaaattggggagccaacaggattctgacagtccaagtagaaaggttaccattatttgagagctaggtgccacctccttcaccttgccaggaccttcccaaggaaggacagaaccagggaaatctcccaggccccaccatcaggcaatagtctccagcatggccaaggcctcccagactggctgcacagctctccatctctatcattgctttgcctcactctgtaccccatggttaattctgcaaagcatcagaagtttttctaatactttaaatcacttttgaaaactggatttagtccaaccatttagcttagtataaatgtattcccttatgtccccagttactatccacaccttgctagtatgttgcacaggtggccagatggcctctgagccaccttgtctctatgattctctttccccaaatacctagacttgccactcacagccttacaccatacaaagctgcctctcccatcccccaactccagctcctctcctgaccctggaacacaaaccactccagatgcagagccacacgattaattaaaaccaccccacgctgattaaagtcttaagctgcagtgccaggcatgctaattaactgagtgagggaattcagaccacaggaagaggtgaaaaaagaaagtaagaggggcgggggagggacttctgtttggagaacaaatcagatggtgacgtgacctaagctgccataatgatagattgtctcagagaccacaaaatattgaggtctgtcccctggccaccagactctagcaaaggtgttgattgatgtggctgcaacttcaccttcgctgcttctagagatgggagccccatcacctctggggacctccatgtgtgcataaactgtgcttggggagaaggattgtgtgcagggttagggtagggtctgcacaacattgtcttgggacatcgtcctggctttgtgcaaaaacctattaggcagtttagcagttcctcaaaaaattaaacagaattactatacgatctggcagttttgcttctgggtacacctgcaaaacaaccaaaagcaggatctcaaagagacatttgcacactcaggttcatagtggaactactcacaatagccaaaagatggaagcaacccaaatatccatcaacagatgaatggacaaacaatatgtggtatatccatacaatggaatattattcagccttaaaaaggaaggaaattctgacacatgctacaacatggatgaacctcgaggacatgatgctaagtgaaataagccagacataaaaggacaaatactgcatgattctgcttatgtgaggtgcctagagtagtcagattcatagtgacagaaagtagtacggtggttgccagggactagggaagggaggaataaggagttactctttaatgggcaaagactttctgtttgagcaaatgaaaatgttcagaagatggagggtggtgatgcttgcaccacaatgtgagtgtacttacaaatgcacacttagaaataattaacactgtgaatttttttatgtgtattttaccacaataaaagagttgaaataatccttttgagtggacttgacaaattatttcatcttcggcatggcagcatggatatgaaaacacctgttctctgcttagctccttgggtcaaaggggaacggcttttgctggtagactaatacaatcatctttatgaaatattctgatatctttcagtcaaaagataggtatcactattcttttcaacgtaatctcaaatgggttttggataaatgtctcctatcatgtatcattacataactggctctgttgttctcaaggtctggatacctgtttcctgatttggaaaaataatgccatagccttgttcttcctggaaattttccttacctctcacccattccaaaaggcctagacgaggagctctcaattcaaataactcacaagaggtcaaatggcccctgattttagaaaatcctcctgctgttgctcaagctctcctttggtatttttcattcacagttatggccagaaatcactcatgtgcccttccccatttacacttcctttccccctagatcacctttctgggaatctgggtggttttatccttttgccaccaaggtaagcttccttaaataatataatgtagtttggtctggttttaaatgattgtaaatagaattatcatttgctgttgtacatgcaatcatcatcatcatcatcatcatcatcatcatcatcatcctcatcatcatcctcatcaccatcttcctaacctgtccagttccaaaggccacaaatttacaaaacaatggcctagcacagcaaggcaatgaatgactgaaaagagagcaaagggtcccaaatcagattttaagtcatggccttggtcttcataagtttctccatctgatgagctgagcccattgcttggggacctgggagcctgggggtcctccatggcagctggaggaatttttacagcttctgagtcctggcccccattgcccaactcccacctggtttctctgatatttcgaaagatgctttcctctggcaatagggtctcactctgcctgttgctgctcacattctgaagggtgcctgctgttctgctgattacattcagaaatgttccacagatatagcatgcagtctctgtgtgtatctctaatttgtttaagcatttgacattatggtcaaaatgtgagttattactccatttctactcttataattggatgctaatgcaacgatggctacactgagcctgatggttggaattaatttaaatgtccaaaaggtttcttaagtacccaatttccttcaaaattgtcaaaaaagaaagaaaaaaagaggcaagatgacccattaagaaactccaagaggctgctggaggaactgtcaagctgtgcagacgctgcacttggtgctgtacctcatgctgtccttccttgtcactgtccccgagcagaggaagtagagttgagaaaagtaagtccttttctggcaaattcttagctcagtaatacacatgggtcttagtggcatggtcttggggagctcctcaaagcatctccacccgccttcatctcctttggtcaccactggctgcctttccaagctttatttctgctggccagggaccacataaaggttttgtggagtctccctgtgatggctccaaggccctcactgccagggctgcaatttgtggttgagcagtggctcaagaagctgtgcttatttcaagtcactccacatgcctggaaccctgtcactcctattctctttgctcaaagggggcaggtatttctgaacctggctaacaggtaagaaaggcagatgccagaaggctggtcccaggctgtggcagattgtattatgagtcccaattcttcactccctaaaaagaagacttttatgtctccacccctatggcctcatggtgaatagacaagtggtgtgtacttccccacttcttggctttgggcatggcctcagaactcgattggccaatgaatggtaggaaacacgaggcaaatgaatgcttccgaagtgcttatgtgctcatctttgccttctgtgcttctgtcattgccatgagaagagcttcccgaaatagctgtttcctcttcagcctgggccccaaatgaacccacatggagagagacctgagcccaaaccacagccaggagacaaccctggctgatgcagcagcttgaagcagaactgcccagctgagttgagcttagggagctgacatgcaattgctttgcagagccatgggtgtgaggattcatgtctattgtatgcaagtgagttttgggctggtttgttacaaagctttattgtggcaatagctagctgatacacaggtgctggacagaaagttacaccaggatgcaaaggtcccgtgaaaggtagaggggagaggtcagtcaaatggaggagggggaaggttgcagtgtggtagcttcttaccaccctgtgcttcaaataggtcatgcaaacattgatggcgtatgtaacttgtacaagttcagaaattattgaaagccagatctaacgtgataaatggcccttctcagtacctcccacgctggccatgctcttttaattctatggtcatagatctacagatctcaggaaggtctagcccctcagcaaagtactaaagaagactctggaaagagaatgcagccctccagatgtggtcagctgtccagaagcaaagatgtgcttcagaccccttgtactgaccatctggccaccccagtgtcagaaaatgatttttttttttctacttggcagcagtaaaaactccttgggaatgatttgccttgagctttgcaattcctcctgctggtgcttgggccatggggctaatccagctgggcctcacttgacggcagacagaggcacagggtcaagggcagcagccttggctaccaccactgtccctacctgcctctaggcaggacctctggggtcaaggttgatgatatttagaatagcaaaggcaaccgccccagggcatgaggcttggggagctgaggttccaagctgtaatctaatctgtgtgtctgggtgaccttgaacaaaatattcccatttttcatgcctcactggattcattttcagattagggggatccagtcctgctctgccttaaagaattggtcacaaaatactaccaatacaaatgatttgggaagcttcttgtaaatgaaaagtagcagatgttgtggagggctgcaatttgttgctattaataagaataaatgcctaataggaagccagtttgctctgggaactcggacagccaaggagcgagtgccgacgccggaatcatcaacatatgttggtcctcattagcaaacggcagtagctgggaagctgggcaaggagctctcagcgtgctttctgcagagcgtcgagaaatcaccccatcctcaggcttcccagtgtgggctgcgctaaaatggcacgtgatcgttattagccagaccccttgccaagcgggagagcgatccccttccctgatgcacagatggaaaagccatagcccagaggggctgagcagcttgcccaaggtcacgcagcagggcggtggcaaaggtggaaattgaaatgaagttgggggctggagcctgccctcgggcctgccagacaccactggctcccggaacatagtacaggggattgagaaacctctggtccctctgctgaacacaggtcctgtgttgaaaacttcacagcattgcaggctacttactatactgccaggaaggtgtggctgagttcaggggctgaggagccccacctacgggcagatcaccaagtagcagccctgaagagagaatgacaattggtctcagcacagcctcctcctccaggaggttttcttactccttcaaatgtggttagggagaaaaatagagtttgaaatagttttatctcagggacaagtgagaagcagagatctgagagaaaaacagacctgggtttggatcctggatctgccaccactgtgtgacttggacaacttatttaacttcatcaagcctctttttcctcatctaagtaccctgatgggttgttttgaagaataattgggatgacacatatgaatgtattagtgttatgctaatggcaactctgttgttccagcctctgcctccgataaaatgcccctgtgatgggtggtgcgaagtcatctctcttcactccactatacctagtactcagctcatgcgcagtaaatgagaaaagtgaatgaatgcttgcatgcacgcataaataaataagtgaatgaatgaatgtggttcctattacacttgtacgtgttccaagaatcccctggagatcatttatttggcaaccttggctctactctaaaacctatcatttctggattattgccacagattaatctcttagtgtaaaggttaaatcctctcctttctctgagctctcatgctcacattcacacacaggctcaggaggcccgacttcctgacttccagggctgcggggttgcaatgtgtgagattctctagctaggcagatcctatgcatttgacagaggagactgcagccagagcaacccctccaacatggaggcccaaaggaatgggggatgagaggagtgttctggcattcacacagttaacaagctgagagggaccttggaaacattctagctgccaatcctcttatttttcagatgaagctcagttgctgcagggatttgtccaaggctacatggctaccaacactcctcatttgatacccagtccctagatactgactcctggccaaaatgctcattcttgaccccatcttaaggtcagggctgaagcaggggcagagcctcagggccccacatcctggagaaaaatgaaagtttccctccccatccccaagcccagcaggtgggaaggggctgttgtcctggggatcaaagtgctgctcctgttccagcctttttttttttttttttgactctgtgtacattgggtattttattagaaactttcatgttactgctacgtaaacactgcttcaaaataatacataagttaaaaacttgtcaagcaagttcttcatcagctgtactcctagaattaaacacacatcacacacatacaagtcaccaacccccacaaaatgtttaatttaactgaccttaaaatttggagaaaagtatcggttggcttatcttttagcaaatgacacagacaaagactatggccccttctgaactgggaccgggaacctactgttgtgtgtttcccaagcacagcctgctcaatgggagcctttgtttctgcagccaagaagaaggcggggaggggctggcacggtgacacctaactcctggcccaggcagcggagccaagctagtccccaggcatatgctgaggctccctagctggctggcactggctccttgtgggaagtggcagggcaggctgggcaggcactcccttctccatctagcacctgacccttctctctgacttccttctagcaagggctctgctgaccagcgttcccagcaatgctctggctgttcaaaccacaaaaaaacagtgtgtgtaaatgatacattttgtgaatgagtgcacagcagcccaagggggtgtgcccagatgtgcatgtctcagcacaggagtagcatttgcacacacctatggggggcagaagtgttctggaccacaggagactgtgtgcaaataaacacatctttcctcgcaggcaaccaaggctgggtatgaggcttctctggctaggaaacaaacatcttttttcaaaaagggatttgactctgggaaaagttatggtgctcaaatgattggaaactgatattcctgaaggagaaccttctaggtttatcaacatagggccccactctcagaagaccaggtgctgctggcttagaaaggaggcagagacgacagatgacccaaggaattctaaatcatcttcgtttcaccctatctcctgtctcaaggtacccacctaactctactgaacttatatgagcttccattgcaggatcagggccaagcctgctgctggggaaagacaaagagggccctctggtgtctgggtcatcctggacacaggcaaaatgtatcttcttcagtaagagatacagctttgagggcatcttccagtaattcttcaaatatgaaaggacaattgttaaaatgacagcattctaaaagttttttttttttttttttttttttttttttgagatggagtctcactctgttgcccaggctggagtgcagtggtgtgattgtggctcactgcagcctctgcctcctgggttcaagcgattctcctgcctcagcctactgagtagctgggactacaggtgcacgccaccacacccagctaatttttgtatttttaatagagacagggtttcaccaggatggtctcaatcttctgacctcgtgatccacctgcctcagcctcccaaagtgctgggattataggcgtgagtcaccatgcctggcctctaaaagggttttatgccttatgcactgtcggtgagtgtttagattagcacaaccattttgaggagtaatttggcagttattactaaaacctaaaatgacccagaaagtcttcctcttggaatctttcctgcagaaataccagcacctagacaccggtggttggctgtggatattcactgtggctttgtatgtagtaatgtctgtttggaaacaacctaaatatccatccacagggggctggctaaaaaaatcgtggcacatctacactctaagataatagtctgtatgtactaagatggatgaatgtctatgattcatatttgagttaaaaaaacaaattttataaaaagggtatattaagactcaatgtttgttttcaaaagacaactgtgcagctgtgtatacatatatatgcaaacctcgtgcaaagaataacttctagagagagagttacatatttgctaacagtggttaactttggagagtttgaatttttcacagacagggtattattgacttgggaaattaaaataatattttaaagatgctttaacctttagtcttttaaactaaattaactgtgcagctcaaaatttattttagggtgacagcttgaatttttcttttttctttttttttttttttttttttgagatagagtctcactctgtcacccaggctggagtgcagtggcgcgatctcagctcactgcaacttctgcctcctaagttcaagcaattatcccacctcagcctcctgagtagctgagactacagacacacaccaccatgccaagctaatttcttttttgtacttcttttttgtagagataggagttcaccatgttggccaagctgatcttgaactcctgacctcaagggatctgactgtcttgaccttccacagtgctgggattacagtcatgagccaccatgcccagcccaacttttctttatacccacaagatttctaatattctggaactatggaaagggctcttgtctgcttggtctctccctcttggttcaccttctgaccagtagcaccctagaagtgagccctgggccatgggggagttttctccttataaaattaactatcccatattgggtgggaaagtcattgtttggcaatgccttattcagtgatgtcacctgtccgcccagaagcttcctgcagaaaacccacaccaattccacccaacatggagaagactccatctctccacagaaattactgggcaaggaccagggcacctctgcctacagcccccatatgtgcagacgctatcacgcactatgtgtgcatcagtttagtttccatgtggaggagtcatggtgtgctgggacatcactgggctgggggtcctaggacctgggctgtaatcctagacccgttccttacttctgcaagcccttagcaattgtcttcatctgtctagctttcagtgttcaacataaattgatctctattgtcctttcaagccagaagattccatcataactaactatcttaaggctggaaaaatctccaggagtgtcactccaggatctccctcaattttattctcatcttggttacttcatctatctgtatgatagggaccctcagctctgccctttccctagctcttgtgatctcaaaaaagtacagtgatatcaatctgaaatatactttgaattctaagaaaggaaattgtcgcaacttctaatgatgaattatgaaaccactagagtttactgtggccatttctatctatcattaacataaacaattgtgagggtgagtaaagggttgtgtgcacatcctttctgagagaatggagagagcacaggcttctgaagtcctagattcaactcctggctcagccacttatcaaaaatgtgtctttgagcctcggtttcctcctatgcataaagggagcagtattaggtgacgattaaatcctgttgtcagtgctcagcaacgtcccttcttgcctttctctgtgtgggactgggaggacagtcaggggacccagcggcgctgtgccagccttcatgctttctaggctgcagacgtaatgcagagcttcccgcttccatctgccaggagctgaccccaccggactgtagtagtaggccagttgctttccattaggaagttcgttttcaaggggtgagtggtggtggtggtacggataatgcatccatttcacattttgcgcatctggggagtctgatctatatccgactaaggctcagaatagattccccattccaaaatgagaaatggctattagagctatatttagactaggggttcagtgagctcagaaataattgctggccctggggtggagatggggtaggaggaggctaattccaggctaatttgggcccattctcagggggggtggcctgggggaaggccgggagtctcagccaccctatttctgtccattcaggcctctgctacagcaacagacaacccccaataccaaaatgccattgcctatgacagacaagctcagtagatggagaacctgggagaaggatctaaaagtgtagcagcccacagggaggggcagcagataggtggaggcttttaataactgaatgttagtcaggagtctgtgggtcacaggggacctgggacctgctgctgctgggacctgggctgtgcagtctgagagctgatgcttagatcttaactctgccacttaagagcttggtcaggcgcactcaacattctcaagcctctgaaagctatgcagattaaatgacataatacatgtaaaacactcaacacagtcctagaccatccaaacctaacacccagcatctgtccttataggcacgaccaccatggccaactcatcttttgggtttgcttttcctgggacagacaacattcacgttaatgcaaagttcaattttaaaattcaactttaaaggtttccagatgtgtccctgtgattgctgaatacttcagccctcagttaccatatatgtaagtgctggaaaaggagtcagaactgaagagaacttgtgatgggatctcacagtcttattcctaacctgaccactgactccactgggtgatgccctgtgatccccaggcctaaagaacccctccctatcaatagggctttggccacacagcacagccccagaactttccaaccagttccctgtctctttctctcctctcttcagctattctgagagcttttgctctgctcttgaattgcataggaaggaaaagaggaaaaccccagcaagtaagttttattgccccagcacctggaaaagttaagaaaagacagggaacacttccaactatctgatgaaatgaggtcaaggttatctgtgttctttatttaatcagggtctcccctgacctctgtgaacaagcataaccaaaagcgtgccctgggtctgggataggaaatcatgctggctcctagccaagtacaagaggccgtgctgtgtgccggcatgttgggacatgagttggcacggcacgtctggaaggccagggtcaggcagtgaggcccagcatggtggtatttggcacagaatccagcagcccctgctgtgacagggacatgaggatgcagcctccagacacaattaaacatggggcatttgctgagtttgcaaacaaacctgcaggatacagggctgaggcagcagcaagaaaacggatgtgacaattcagggcaggtagcatgccatacgtggaattcattttcgaatgcttttctcctccattaagcctgcttcggatgttgctgggaatatagcttaacctggaccagggtctggggcagagtggggctggtttgggttgtgtgcctccccaggcaagttcaccatgccaccgtttgctgagttgtgggccacccctcagggatgctcacagtttaaggggagaatcaaggcacttacaaggtgctaaggaggagggaaaggcaggaatttggggtctaggttaattggctccaaacttcactgagcaacagaatcaacagtagattctgttttgctggatttaagatgctggtgcctgggccaagctctgagcagcaaaatcaaaattcccaggagctgggcatctgtattttctcaaggccctgtactcctccactcattccccaacccatgaccctgttaatgggctgggtttgggacaactggccttgaccatagggagcagaggagttagtgatttgaggattatgcattttgccctggaatctgagtgatacggcaggtggaaggctatgggggcacagggacagggtgggggtgagcatagagataacactggacagctgtacatggcttccccattcataagcaatttcacagccatggttgcctatgaccacattctggtgaggtagccagctcagggaggacagcctccagtttacagatgaagacacaggttgggaggggttaagcgacttgctcaaggtcacgcagcctgtgaatggcagtgccaggtccctaacacaaggtgtctgtgaccaacggctgctctatgacatggcgcagcctcctttctccactccagtcccctctcttgcaggggccaggtggctgtaactctctcgtgatgagctgcagctgcctaattggttgcagaggcaagttgtcccaaacatcatggacaatgatgaaggcagagttggcttggagaatttccattcaaatatatcttataatcactctttggccaacatgtttccctcacaaggtctgtctccttctacatgacacacatctccaaataaggctctctatcatctggggcctggcaagattctagacaatcgctcagtgtggtggtgcaatgtcaccctggccaaacccagcaggggctggtatgtctgacttcatgagactttaccaattatggaattgtttcactggatccaggggctgcagacttcagggctggccatatcctgaggcaactgctgcctggagcttggtagggaatctacatcctgtcttggggccaagggtatggtctggggacacagagcagcaggagcccacaggtgggccaattctttaggacaacctgaccttcacagggctcccaggctgctagaactgagtgggccattagttctgacacagatgctcagttgtggccctgtagatttgaagggaaggccgtgggctggtttactaggccatgttttccgaggcgtctttccagctatgctgaagaatcagtctgaccttgcagaatgtctgtagatggaggaattggaagggtccctctcagctttctgtgccattcaccctggtccagccaagggagaatccagcaaaatcattgacatgcaaaggcatctttggctagcatgggccttaataaagccagctctctgagatggagggtgtagctggaaaagggtcattgaaggcagaaaagttggacagaaagctccaccccgtagggcccatctaatctctgcaagactcctggcctggaaggccaccctggtctgccctcatgtcgggtcactgagactcagcaaagcctggagagggtctccccacccctggtgcttctctggccaatgcttcttcaaggagtgaagggaatctgaaaacagtgcagaccaaatagctgctgtgtcgacgaaaggcggccgggggctgagcaaagggtggcattggtgacaccacagggtatgaaaggttagctttgcatgcctcagctccctattagattttcccttttcttcttcctgctttcattctttatcagaaattgcctagtgggctctctctcactcatacttcagcacgaatgggctggcgtcaggccgttgctggcagtggctgctgcaggcttgtttttgggagcagagtcaaggagcagaagtgaaagtcctgtgttctcaatgactccaggagcaggagaccctgcctgaccatagcccctgcctttggggctggccttttctcttttctcaccactctcctccttcctgtcccctgtgatcagtgaccctgtgacactcatgtgcacaattctgtaggagctatgcttagaccttttgtgatgcttggagaaaccacccacacccatccagaccccagatccaggaaaacacctgggaagaagacaaaaataactatgaaagcgtaggttggctgcactaacctaattctaggaccaaagaatcccagagttgggtaaaaacttagttgcctaatccaaacttttattggatataaccactcaatgcagatatttatgctatgtgtttgccagttacatccaatttgaagaaaaataataagaataacatcattaaatataatcagacatgacttatgaaagggtttgatgcaacattaaactgtgtttactggtactgttgccctaatttattgcttgtgtgccacggtaatctaatcataattacaaaaacaaatagctaggagcattctttacatctcttggtgacttagcttctaaagaggtccctcctccatccctagcagacagtattgagccacttcagggtttagagttcttaggataccctaaatgaatagcacagaaagcttggatggaccctccatctacagagagtctgcaggctcagacttatttctcagtacagctgggaatatcactcagagatcatggcttagaaaaccagcccatctagctgggtgtggtggcacgcacctgtaatcccagctacttgggaggctgaggcaggataatcacttgaacccaggagacagaggttgcagtgagccaagatggtgtcactgcactccagcctgggcaacaagagcaaaactccaactcaaaaaaaaaaaaaaaaaaaaaaaaaaaaaaaaaaaaagaaaaaaggaaaaaagaaaagcaaaagaaaaccagcccatggtattcccttcaaacctccagggctcggtacctgtgggataaggtgtgcattcccaaggccctccagccagactggactcactgaagcctttgtgcatcttggttcttctatagtgaggggcggtccatccactacccaccaaatgagacctgcacacagatgtttatagcaatgttattcataattgccaacacttggaagcgaacaaggtgcccttcagtaggcgatggataaataaatggtgtggtacatccagacaatggaatattattcagttctaagaaggaatgagctatcaagccatgaggagatatggaggaacctaaaatgcatattattaaatgaaagaagccaatctgaaaagcctacattgtgtgattccaactatatgacctggaaaaggcaaaaactatggagacactagaaagacctgtggttcaatgagatataatctcatacctgtcagaaaggctattattaaaaagacaaaaaataacagatggagaggttgtggaggaaaaaggacactgatgcactatcggtgggagtgtaaattagttcagcccctgtggaaaccagtttggagagttctcaaagaacttaaaacagaactgccattcaacctagcaatcccattactaggtatcaacccaaagaaaaataaattgttctaccaaaaagacctgcactcgtatgtttatcgaagtactgctcacaatagcaaagacatggagtcaacctggatgcccatcaatggaagactggataaagaaaatgtggtatatagataccgtggagtactatgtactcataataaagaatgagatcatgctttttacagccacgtggatgcaactggaggccgttatcctaagcaaattaatgcaggaacagagaatgaaatactgtatgttcccactaataggtgagaactaaacagtgagtacacatgggaacataaagataaagacgggaacaacagacgccagggagtactagagtggggaggatgaaagggggctgagggttgaaaaactgtctatctggtactatgctcactacctgggtggtgggatcatttgtacaccaaacttcagcgacacgcgatttacccatgcaacaaacttgcacatacatgtgttgaacctaaaataaaaattaaaaaaaaaaaaaggatctgtggttttcaggggttggacggggttgtgggagtggagagggatgaatgggcagagcacagagaatttttagggcagtgaaactcctctgtatgatatcataatggtggatacctgtcattacacatttgtccaaacccataggatgtacaaccccagagtgagccctaccaaagactgtggactctggatgataatgatatgtcaatgtaggttcattgattgtaacaaagggaccactctggttgggaatgttgatagtggtggacagtgggaggaggcagggggtttataggacctctttctgctcaaatttgctgtgaacctaaaactgctctaaaaaatagtctattcaaaaatagtaagttagaaaacaggcagtatactactgttttatcattcctttaatgaatacacctacattcaaatgtccttccttgctctcacacggccaaatctgacatgcccaggggacatggaagaaggggaaggagcagaactgccaccagtactggggctgctgcaaaggctgagggacccaatgtggagagccaaggttgggaaggatgcagagtcctgcggctgcgatgcctgcagtgggctggaacagaaaaaggctactcagtaaaatttggcaacggacacgaactcactttctctctcctagctgtgcttttcctgcagggactgaacaagggcagtgtgtgcacatgtgggagtgccagaagcaccagcgcaatccagatgtgcccaggcccatctgtgcgtgaaaatgcagacacaccacactatttatcaattagtgtctgctgctgccagtgtcaccagttctctgcctgatgaatgatgctaggctggacaagccacaccccaaggtatttccactgtctgcagcaaagcccaccaggggctgtcaataaacatccccagcatagcccccaggcactgaatgatgggagtgggtcagatgggcacagcccttcaggacccgggcagctgccggccagcctcgagcagtccactaaaagaaacagttccagatggtgcctccgagcacatcctctgggtagcagccactctgccctagtgcacaagacatggctagatttcagcccctactcagccccttggtgaggagtccttgtgcagtgaccaacctacacaacagtatactgtggctctgtgagcacctacacacacagtcccagggaaatgagtgtatctcagagatccaggagacccaaaaccaatctcagctctgccttacttcaccagcagaggttgaccaaatagatcaacctctcagggctgccgttttctcagctgtaaaatgagaggctccttcctgctctaacaatccaagatatatgggaaattgagagtacatttcccttcctttccccgggttgcccccctttcccttcttgaacttgacccagcccttccagaccaggctaaaactgaaaatcaattttaattataaaaatccgtttactgtatcaataaatcattctggctcggcttggtggtggggagaaggttacacctggaaccaagctcataagtcactctctccctctgccttgccgctcgggggctgccacccctctgctccctgctccaatattcatctccgtcattaggctgtggattattaatgatgtcctgggctgatggatcggagcccagatgctctgaaacacattgtgctggttgtaacttgattttcagtggaccccttgacagcaaaccttgatgggctttttcccctttccatggagggggtaaagaggggagtaggactgtccttcaaggtggtcccatggctgcaggtaggaaagagttggtggcacagacaaatggggtgagcctgcctctcccagcccacttactaggagacagcacagtgttatgtacatgtcaggttcccatggcaatgagacttttaaattaattaactgatcaattaatattgttgttaggcttattccttgcgtgcactaaggagagaggcaccatctgctttggatggcatttcgggggaagggggagctcctctgctggcttaagctcagtggggaggctggggaggaaggcagagatgctgggtctaaggggtcaaaacatcagcggactgccagtccctagagaccacttgtcgttcatgactccctaaggtcagtggttcaagttcacacaactctgcgtaacaccacaacccaaggtttggatggagctgggggcgggaagccacaaatagtgggtggctcagtggaaccaattcctcttactaggggggttgaagtctcacttcctttatggcatgtgacccctcgtaagcttccagtgctttatgttgtctgggcccctgagccttacatccaggcagcctgcacaggaccactgaggaaagcacaagtccatatgagagagggaggctgagcttctcccctgggtatccacagctttcctgttctccctcacatccatctagttggcagagatgcaaaatgggaacttctgtggaaaggaacctggcatggctggcccaccaccagtggggtggggactgcaggactggccatgccaaatgtgttctggccatgccatccacactcaccaccaccctgcacaggcttaccaagaggcaggcatctgcagcacttcgaccctgcaagccagcagccccgtggcaccccatcagagcaggctggggcagcagcctactgtttactagagacatgcctgggctgagttatgagtgcctccgagcctcagcttctttacggtaaaataggggtaagaaaccctacctgggttgttctgagagcttgtcacactctagttctggtttggaagctttacccatagttagaagacagagcggagctgacacttacaacctagcaaattgtccactgcatgcattgattttgtgggagagaaaactaaaagtaacactccagatgagattttaggattgtttatggagcactggactcaaaatcaaaagacctggatttgagagctgactgccacatatcggctgggtgatttttgagaagtcatttaacctttctcatctgtcacatgagataatggtgccaacttcaaggagttgctgggtaggttcaatgagagattgtgtggaaaatcgcttgggaaatagcaagtactaaacagatccatggcatcatttcatttgctaccactgtaccgttagcaaagataatttagagttcgcctgtatcaagctttctagggtgcataaatgatagtaactattaacttcttgattcagttctttcactgccttccattaaggcaccagaagagaaatcatttttccttttttgttcatctgctcgtcattatttcagatatcccgctgcactcagatacaagactgaagaagcaagaacgttataaaaaagaaagaatgaaaagaaagaagaaaagcaactaagcccagagatggatcccaaaactgaagaattggtttaattaaattgaaagctctggtgcttgtggtaattgctatgaaggaatccatatcccatcagaaccctctcccctggagtttgctccctctactttctctgcagcaggtactaaaattgcttttatctttagggagatgcagcccacagggcccagaaattattgtggggtcaactgtctggagtggggcttagggagtagtagcaaataattcggtccaaacctggctttgaccttgaatttccccaacttagacctcactctttttttttctgcaaatgaggcctcatatgccctggtttgcagagacacttaaaagtaggcagtgcttgcttttgtggcccctctgctacttctgctatacacagggcgagctgggtttataacaccacctaaaccacaggccacgctgggctcctcatgccctgagctacctcatctactctttgggcatcatttggctctgggaaatactgtcggtcctccccgcttttttttttttttttttctttttctttttgtagacagagtctcactgtgttgctcagcctggagtgcaatggcgccatctcggctcactgcaaccgccgcctcctgggctcaagtgatcctcctgcctcagcctcccaagtagctgggattacaggcgcctgccacctcacccagctaattcttgtatttttagtagagatggggtttcaccatgttggccaggctggtctcagattcctgacctcaagtgatctgccttggcttcccaaagggctgggattacaggcatgagccactgcacccagccctgtctgtcccttttaatgctaatagagaaacttgatcccagaagtagataaaatcagcttttaaacaacgacaaatgcaacaagcaatggcaggccacaggaagcaattaggaatagtgagcgggaagagccctgaagagacctgggtttgagtcccaaccacaccatataccaggttcataactttgagaaactctgggtgttgagtttgaattgtgctttggggtcagctgggtcctgcctgattgtccaggtttcaaaaccattctaagcatctagatcaaaacaggttgtttccatactttcaaaaacactattttgtttaccaattatcaagcatttgttaagtgtctatcccaagctaagtactgtgctatattggtcaggtcaggcaacgcagcaccttaaaagttgaagagaagcctttggaaccattattcattcattcaattgaatatggtcaattggcatcatgaatctaacaattaggaattgggtagcaatatgaagggtgtgtatgggaaggatcaggtggcaggagaacagcaagaagacaggattggggtcattttcagtcctgggcaaagaattgagcatgcagacaagatcagtggggtccttcctaggtatttatgaatccctgaatctcaaactgaataccttgtgtagcagaagcgagcgtacacagaccctagcagatacacatgtgaatctgggtagtccctgaagaacaggacagggctcagctgcaggtaccgtgcactatgaccctgccagccacacacatgggcactaacattctgagcagtcatctagaagccagcagccagtgcaggatgggggtcccaaagggcttggggaatccacaaaccacatggtcacacccttaatgccgaagagcaggggaaatggaggtgcacacaggtcctaactataacatgaaaagggatgggtgggaataagaaaaagtcattagaaaagaggagctctaaaatggctcagaatcaagaagaagttgactcagtatcaatgtgtggctcagcagacatcaaatcccatgataaagccttgtttccctatgttcactgggctggaacccaaactgaatccagctctagggaaaaagagaaggtttggggtaagagtgtgtgtatatgtgtggtgtatgtgtctgtgtttgggtgtgggtgtgggggggagggtaaggagctgaattttaaaaatccatcacaatcaattatcacaagtatgtccatttttccagcctgctagccagagtcaaagactgtgtgcatttgaaatctccaaccttttaaaacattactgtgaagttgaaagttcctggtgtcttttgattaaacatcgtgctaggtaatgactgttttacttcttattcttttttgcccccttcaaattactgattgttgtctgacattaaggccccatttgctcttaggaaattaacaagcctacgaaactcttaatgaattgaaactcatcaaatgtttggaaactatggcagtcttaagattcttttccttttaatctatctctctgtgaaatgtctcattttttccacatattcacttggattcagacagctgcactttaggaattaggttttgagtcttgcttatctgaagtagcagggagtcacctgcccacagaggtgcaagggcttgagaacttgggtggtttctccaaccagcaacgtgcttactgtctttctgcataagcatcgacctggctgcaccaagtgatttctactttccatccaagggtgccttagagctttaatacatttgaaaagacatttctagggtacagtctggtcatcaaacagaactacttccattttggaataaagtgactgggcttcaaagggattaatcttgtgtatgggccatgccacctgctagggagttgtgagctaatggtgggcatccttgaatcccatcttatctggatagtttctccttttctaatgccatcatcatctagcagcagaccatatacagaggttccagttgagaccttcagctttgtgaagggcgggaattcctgaaactgtcgcaaggcttggggtctgaggaatacataaccacccaagtaaggagcatccaggagcaaattccacactatctcttgcctcagaagtcaggaaaaataatcaggtaactaggaaaccctgaggaaatttcagtcatcagttcaccttgggaagtggagttgttatgtgagtgtttatgttcaggtgtgtcagtaggaggagcctgatgaggatgaagaataatgagcatagcccaaggggaacactttcctctctagtcaacaaccatttccaatccttggacaaccaaccacacagtcgcaaagccaggtgtccttggacacatgtgaatggggagaggggtgtgcccagctcacagagccctcagccctagagcagttctgaccttgacttagtatatcttccagctaatcatgagtctagacacacatgccccaaatagtcttggtagaggcttcccagggtgatccactgctgttaagctacatggtggagctgggaaccacatggcaatccttggaaacatcatgccatcatctcatggtatttagattctcagctcaaaacttagagctctgccattggcttcttatatgatatggaatctcagctcttcaatcctcagaatgcaggaaatggtttcttacatgtattcggaaaacaagcatactatgtagaacaaataacacctcaaaccaaatggaggctgttgcgagtcctcaccataataaagcaaaggaaagaacccgtggggtttctgcccatgtctgagagctgaattctggcttccttgctcctgcttacttcttagcagcaggaccttggccatcaagagttaactccatctgactctaatgcacgcactgccacccagaacaataagccaggcaatggagaatcctgccaggaccagtattgattggcttgcttgattagttggttaattgaatatcactgctttctaatataattaaaacaagataaatactggggctttgtcccgtaagcaagtgccattagtgatcatggtacacaccgtgattaaaaatgcaatcgactgggagggttatttatgaacttgccagcctctagtgccactccatggtttgcagggccttgagatacaacgtggctggcatagagctccctaacctgtcatgactgtgctggtctcttaagaaaggaacttatttcacaggggaatgcatgcaggtaaaactattttatgcttgcccctagctcccttgctttaaagtatcagacagtgaaactacagcaccatggaaataccatgcatgacagtttcctcctttgcctcactttcctcattcccaaatataagactggctttctgcccactctgtgcaattctttattttaccctcatccagtttcaccatgagtttgaaattttgtttggatcactggtctgctcatgagacacttatgaaaaattacctgaagcaaggctagttggagtgtggctggcgggagggtcatgggtcttatttacataggagcagaggggatcaccccacaggctgctaagagagagagctaaatgcttcatgtgaacagcgtaggtgcctatggactaatctactcccacatgacatctcagactgctggtgcctccaggaggaggaaggctgccaggcttcctggatgacagatctcagcccccttttcttggatagcatctgttgcttcctcagttgaccaaggaatgtttgtggcatgtcaactgctggccttcctggtgaatgtgtggtgtggggaaggagtatcatgtcaccttttcctgagtcccacttattgatgtttcagctgtccctgttttgagcaaggggacacggtagcacttcatttagggctggtgaaagtctcagttggcaaggcacttggaatacctccaaaagtgggggctatgtaaaaacaaagtattattattctattagcttgtggtcttaatatttggaatgtgtccacatgacactggacacatgcgtcctcccccacctctggctctccacattgggtccctcaacctttgcagctgccccagtacttgtggcagctctgctccttccccttcttccgtgtccgtgggacatgtcagatttgggtgtatgagagcaaggaaggccatttgaatgtaggtgtattcattaagggaatgataaaataatagtacactgcctgttttctagcttactatttttgaatagactattttttagagcagttttaggttcacagcaaatttgagcagaaagaggtcctatagaccccctgcctcccccgcccccaccatctgccctcccatgacgacagccttctccacagctccaccagaccggtgagcaaacattacagaccagatgagagtgaaaggatgctgctcatgatgcctagagtggcatgggacaccacatcagctctcttcagaactgggtagtgttttgatgacaggttaggcatgtctgaaagagccagcaggatctgaaggtgcagatgcaatcctactgtagaaataacaaaaagctgacccactggtgggactctgacacattaattttttttctgccaaaaaaagatctttttttttttctgccaactgttgcccttccaaaaacatatccctctgcaggttttattttatttttgtctttttctgggaatgtggcttcattttgttgtccttttccctgagtggctgccaggtttggatgaacaggaacacgctgctgggatgtctgatattgctattgctagagagaagagaaaggaatgaggcaaatagggagtcctgcagaggggagagggagctgtccctagtacattatgggaagtcagtgctgaggcccctacttttaatgggaaatcacaaagaaacgtgcttgagggattgacaggaataataaaaaacaccagcatgctcagaatccattcggttcaccctcaggtttctaagaactaaactcatcgtcctaaatgcttacttggagagaaaccactatacgtaaagagacatgtatatatgaagaaacaaggacatagccctacctacagttttatttttattttgccataaaataaatgcttattaatttccataccacgtatggagagagctgccacatgtgaatttcttttagcaataattgccgtgcctgggactccttaagttatatataccgcgggaatagtttccaaataagaacccagagagagggagagattcacagacaatagcttaaaaagtctagaaattatagaccgattgaggtcagcaagaaacaaattattcaatatatcccctgagggctagagccagactttcccctatgattccaaaattacttcgcagtttcattagggtgaaaggcagtgcagtctcatgagttcagaaagtaaaggttgttccttaaaatttagatagacttgacaaccacttaggatggcattttggcattctgtccctgctcatcaaagaagttgctcaaatttgtgggatagaggaatgagagcaagaagtattttaattgcaataccttgtgttgtatatatgtaatacctctatgaaaattcaggaaatcagtactgctaataaacctgatgtacaggcagaatcatttacaatgcggaggagctgtcctcaagttctggtgctgaaatacagaaccaaagaattttatcatttaaagtgcctacacaatatgaatgaatgttttctcctggctcgagtagagttgctgctcaaccatctatgaccaatataaagctaaaagagtacttgttccatcaatagagaattatagaaaaatgttttttgaaacttttcaatgcagtggagatgagtagtactcacttacatctggttcttatttttttctgagacacatagaaatggagcttccctacccccttgcagttatgtgaggccatatgactatctagtggaatgtaagtgaaagtgaaatgtataactgctgcaccaaaagactgaagtcactgtgtgaccattcagctcttttccccccacagcaacaataatattgaccacgtttgagacagaagagccacaagagggaattagcctaaattcctaagcgcccacctggaaaggatcctccttggaagatctgtcagatccatagtaaactttgaatgaaagagaaataaaatgttatgtgttaaagttcctgaatttttgaagcttatcctattctatcctatctcatcttaatatactaagttattcatctggatgtctaaaaaccatgaccatcacaataaaaccttacactgctatcaaagtaatcaaataaatagatagggaaacaaggaactttagtcacttaggaaaaaaaaaaaaaaaagaaacatacctgacaatgtcccctccctccaccccagtggttactggtacctagctttatttgggaaagcaacaaaggaaatatttccagaggctgaggcacctctttggtatagaagtccatttctgcactgccttttaaaatggtcaaataatccatgttgaatttctgataatcagagttctatgtataaagaagccaaggtcaacaccactgccatgaaatgatggatgtaactatcaagcagaggtcaaagaggatcagaattcaacagagaccatgggatgtggtcaacaggaggtcacaggctacctttttaaaagagtagcttcattggaaaaaccagattacagagggttggggaaagagttagaggtgaaaaaatgaaagtagaaactctaaactacaggctcaaattacgtggtggtaaaaggaaagaaagaaaactgtagtttaaaagagaaaaataaaacttgagtttgaaggtagaggtgaaaaaacagatgataggaagaaatgcaagattttgaaaatttggacagaaagtcccatgtatgattgaaggaaggagggatcagagcacagggggaagacacttgttaccaggaggagaaacacatgagggtttaggtaggtttttcttctgcatttctcacttgagtcagtgcatcaacatacaactaacttctaatggccaagaactccaggaatcatcgcaaacatgttttatgtccttcagtcttccctgcattctgttatcatcagtgctatttaacctcctcaatatctcttaacctatacctttgtctgcatttctacagccttaaatcaggacattaattttgatggagctattcaaatcatagctttacaagtacattacaaacttctcagtttctcatctgtaaaatggaaacaaaaacaactaatttttttaagcactgctgtgaagattaaattaaataagcccctggcagtggatcacaaaaacttcttgcttggtatccctagccctggatttcctagtttttatttattcactattttgtcaccagaatgatctgtttgatctgtttgacaatcaagtcttgcatagtttcattcctgcctaaatcaagtcagttggtctctttcatttatagagtaaaatccaggggttcttttagtatgatactaggatacagtatgatacaattgttgcccaactcttcagtcttcaccaatctctcatcttaacttatgtcccagcaacattacacttcttatagcttcccttaagacacagtaatgtttcaaagtttcctatgactttgtaatgctgttccttctgctgaaatgtccattttctctctggttttctcagcaaaatcctattcatccttgaaacccagctcatatttggcctccttaagaacgttcttcatcgctcgttctccatgttacctctccataatgtattcacttcggttgtcacacttaactcattatattgtcatttatgtctttgcatgtcagctttcaataatcatgaatgctttgaagggcaggctgtgttttatttaactctgtaactctctttcctaaagccatatctactacctggtaggtattcatcaaatgtttgacaaatgaataattgaacaaatgcatttgcctgtatggagcaatcataaaacggtcatgaagatgatccctacatagccctcatcttcatggagcagatgtcatccactctgagtgatgtctgtgtttctggaattgttgaaagtggaagcattggaacctaatgttgggggaaaatataatacactaagctcacactggaaactctttgtttggaactgaaaccctttaattcatgcctcattggttttcaacacacacacacacacacgcacacacacacacacgcacgcacacgcacacacctcccatcactttgtctccagaatcatattataggctatctcaaccttgagaattgcacccagctttgctgactgacctcaactatgtactgctcaacttttcttctgaccttgattctagaatataagggaagctatattgatgaacagcaagatcctcacttagttatctgctggggtagtattatgctgcatggtaattccgcttagaggcaaagaggagaggggaggtagatcagggaagctgatggccatagtgttgactgagaacctaggactccctacttgagtttcctctccatagccacaacttgctatgagacttcagcttgtttccccccatttataaaatggagagaactctgtaacaccagctctcatctatctacaaaaataaaaaatggaaagagacagcctccagcttttaaagtactgaaggggcgttaagcagcaactaaagtccagaagtctcacttgaggaaatgagaacttatgctcatgtaaaaacctgggtgagagtgtttataggagctttatttataatttgaactggaaacagctcaaatgtcattcagttggtgaatgggtacactgaggttcacccatgccatagaatactattcagcagtaaaaaaaaaagggggcaacaacatggataaaggttaaaagcaccgtgttgagtgaaagaagccaatacaaaagagtatgtattgtataattccatttctaggaaattctagaaaaggcaaaaatatggtgacagaatacaggtcagtgatttccaggtgctggagacagggagagaagactgacagcaaagggtcataaaagaattgtggagagtgatggcaatgtttatatcataagtgtagtggtaattacgctaatatgtatatatatatatatatgtatatatttctattttaagacctattgattttgaaataattttggacttacaaaaaagttacccaaatagtagaaagagcttctatatccccttcccccagcttttcctaatgttaagagcatatataaccatgtcctatgctcaaaaccaggacattaacactggtacaataccacgacctaagctctaggccttattctgatttcgccagttcttctatttaatttctaattcttttccagggtcccccattccatttacttgttataactcctttgtaacctcatcatctctcatttctaccaagtcctcaatccttcattgtctttatgactttgacacttttgatgagtactagttggtaattttgtagaatgtctgtcaatttgggattgtctgaggttttcacatgattagaatgagttatatatttttggcacgaataccacagaaatgatattgtgcccttctcagtgcatcctttttttttttttttttttttttaagagacagggtctcactatgtcacccaggctggtcttgaactcctggcctcaactaatcctcctactttagcctcccaaattgttgggattacaggtgagagctatagcacccagcctcagtgcatcatatcaaattgtcatgatgttgtcaagtcttgttactgatgatattaactttgatcatttggttaagatggtttctgctaggtttctacactataaagttattattttccctttgtagttaataaatattcagggtcaatactttgagactatgcaaatatccagtttctcctcaaactgttgcccacaattttgtatccagtagtgactcttctctataattattattgtaacataattaaagatttttcctcttttcttccacatttaaaaatcttgattttgtcttctaattgtttaaaatctttttattttgaagcagttatagaaccacaggaagttgtaaagatagtaaagagatgttccatgtaccctatacccagcttcccccaatggttatattttacaaaatcatagtgtactatcaaatcaagaaattgacatttctttaaaatgcgggtatagttctatgtcattttattacatgtctagtttcatgaaaccaccaccacaatcaacatccagaactatttcatcacgaccataaaaccagacacttaaaattggtgatcagaggcacattatacctcagtaaagctggcaaaagactgaaaccaaaaaccacccaaacattgccaggatcatgttacactaagcactctataactattagctctcatactgttgctgttttatcacagagaaatgccagtcccagaaagaaacaaaggggcaagggacctctccttttgcatgcctccctgattgctgctattgtggatggattcgatggaaatgagtcgccagcacctgggtctagcactcctctagctctactggagtgattccagggttgtcacccccatgcatgtgacatgtgactctcatgcacatcagcatgggctttcttttgctcccattttccctctctgcagtgactatattttgttatttgcatataccaagtgcatcttgcttccgagtcttttccattgctgttccctctgtctagagtgttctccttgaagacatctggtggccagctctcatttcatttatgcagaaagagcttcctgggccacctagtgtgaactggcccctccctgcaacccttagtcccagtttctctctatcatgtgactgtgttattccattatagcacttattgctggaagaagctgtcttggttatttattctctgctgtgtttattgtctatccctggtcccctccagaatgtaagctacataaatgcatgagcatagcctgtttggtccactgctgcctctccactctgtcaaaggaatatgagtggggactttctaaaattgttcacacccccagaagagtttttctaccaccttccttctcattctctctcctcttttcttctctttcagctctctgtctcctcctgcttccaacacacacccattgagatggaaaataaagtatagcatatcattagtggaatcacaagcaaacccagagacttcctcctactcccacccttttctgcaatgaccccccctttcccaccctttcccttggcgccctgcctgttgttgatgggtgcctgcaggaggagtgcccagaaagcagggctctccctgagtcgtccctaagcagcttattcatgaactgcatgtaagttaatagaaaaggtttccccagaaatctgcaggtttcttgccgttcccactcttcccctttgccctgttacaatctggttagccctgttattattatttctgtggaatggcatatatccgtgccattaactctacatatttctaggggaaaaaggatggagaggaagaaaagactgattatttatcaaagaaaagacattttttcctctctctagacagccaggtagattttctgaactcatatctgccatggaaatggggctgctgcttctgaaatgagtcctctgtgttgggggtgggctctgtttttacggccagtgggtaatagcattttctgatttatgaattggcatctgggggaggtgctgagcccctagatggattcatcgtggggagaacagccatataaatactcctgtcacataaaattattgttctcattttgatttttaaagaattttttcttttgcaagatggtgggattgagaagatattagtgaggaagcaggagaggaaggagtcacttggcccctttttcttagaaggcaaacatttttgtctggacattctccagaaacacggggttgcttagaagtcaattactagaatggtttacttattcagggaatacttggcactgtggcttaagtgggggaagctggatctcaggagtttgacccaggctccaattgggaattttttttaactggtgaagaaagggtcatttcatgtaagttcctcccaccttccctaaatcagtgtgaagatgcatttaaatgcaccagatgcttatgggtagctgcacagtaccaaccaccatgcaggtcctgtgagggctgcaagccaattataagccctggtgtctgccctgcaggagagtgcagtctggaggatgagtgtgaggatgactcagtataggacacaggctttgaatcacgcacaggattcccctggggagatgagtcctacggtgtcctgaacagatggcaggaggaaagcagaggctcaggagggaggacacacaccatgtggctgcctagaaaatgagaaactgttggcggtttatgctttgtgtttcagacacttctctccaataaacctgtaaactttctgaggacgaggaccttgccatagacttgtttggttcttaccccttttcttccctgaccttgaggcttaacacctagcagggcaggagaaaccacactgttttctaagaaaggccagatagcatatatattttagactttgcagaggccatatggtctctgtctcaactatgcaactctgctgttgtggccaaagcaaccgtagaccacacatgtaaatgaatgggtgtgaccaagttccaatacaactttatttccaaaaccaggtggttgatcagattgggaatgtcgcttgccagcctctctactgggtgaacaataagtgcctgctgaattgagttaaaatgatgtcaattaataataagtgtacctcactttttaaaaatgtcaaatatgacctgacaaagtatgcaaatgcagaacatgtgaaaagagttattttctatgcagaaagttcctgtggccaaataacatacaatctgttctatgaacacatgtcaagaaatggtcccttacatacaacctgaatctcagaattttctccagtgtgcaagatatggcacagacactatctttttgcacggcgccaggcttcagagggcagtaaaagggaaagaatctcccttctcatttcataggcctgaggaggagctgtgccagagtctgagactgggaggcagactcttctggatgggggcagcccaggctgttgggctgtctctaaccagtatgtctaactatgggaggcttctgttcatttctttatttctttgttttcaaggcagaataaactccaaattccaagggtcaactaagcgcctaccaccagcccatgcatggccacaaaaagccttcgtgtcatcagtcaatgccaactagttaataatgaccagcctcttcactaatggcccgaggcaggggttctcagggcagcgaaggccctgggacagagacttgccagcggctgcatggggagaatggtttgcaagaagcatatctgctggccactatcaagggcatatccacccatgctcagctctttagaaagatagtaattagttttttccccttcggtgcacacagtgaatgcagcagaatctggtatttggagaaccattggagtctgtccctctcatcttgatttgcctgaggtttatgtctataactaagaaatatcaagattgcaaggcagttcaggggatgtgtttagctcccaaggagagaaaagaaactttcacacgtcagggcttcaggcaaggagaggccactgcaaagggaggttgatcgtgactcggctggctctgtaccacattgtgtctcttgcaaactgcaggtggtgataacaatgactgaatagtaagctcccagagggtatagagcttgtcttgtgctctctggatgttccagcatgaagacatatgcacaaagttacagggaaaagatttctagacctacagagtccattgtggtcatctggaaagtgcttcctgactggtgagtggtgcacactgtgatgggccaaggtgtgccattggggcagctggaagataccttgttccctctggtcattagaggacttccatcacttgggctagacacacaaatacattcattttccatgtgtgccttaacatagtgacaggttggaaagcattgatctgctctacacatgagaaaattaaggctgggcatggtggctcacacactttgggatgccaaggtggaaggatcacttgagttcaggagtttgagaccagcctgggcaacatagtgagaccctatttctaccaaaaatttaaaacaaaaaatagccaggcatggtggtatgcacctgtagttctcagctacttggcaggctgaggtgggagggttgcttgagcccggtggggttaaggctgcagtgggccatgatcataccatcgcactcagtctgggagacagagtgagactctgtctcagcgaagaaaaaaaagagagaaaattgagacttggaagtcaaggtctcacaagtcaagaacttgaatccagttagctttactctatgtttaatacttcacctgctactccactgccacccacagtaaactgtcaacaaataactgtagaaggcaagttgttgagatagagaaatcactttaaaactagtggacggagagatgatgacattagcatgacttgagatgggagccggacgcccaaagctgaagtcaacatattgccagtttacacaaggcattcttccctaggttagtgactttcattttgaccatgactcatggcaagagatatgttttacattgcaactcagggcatacatacatgcccatatatagtttcacaaatagtagttatccttactatgtttgatggccactattctattcgactttattctattccattaaaaacaaattctggtcatgaccctttaaattgatttcatgacccactaaattgatttctcgacccactaatgtgtcatgaccagcagtttgaaaaacactggcttgacccttttccagctccccctccctcctcagaggctgggagaatggaaggtaaatgtggagaaaaagaatgagacaagagatcgagagattgagataaaaataaggaagaaggtgggagaaacacaaaaaatagtggaagggataaaggaaagaatggaaattaaatgagaagaagggagaaatgaatgaaaaatgggagacataatgagaaaaggcaaaccctacactgacagattcatatccgtgaaaactgctctcaagctccatagtcattctggccatatttatacaagaatcttccctgccagcattaatggccatagccttgataatgctgtctgcctgtctggggatttcttatctgtcagcaccatctcaaattcctatagtgactctcagagagaatcttccatctgttcttcaggaaaagaacagaaaagactagaaggcattgggtaaattaccaaggaatagaaagtgaccacacccactttacccactcctttgcaccgtgggttctatagactttgagctgagtctacacaacaaactcttggtacaaaggaaattgttttagaaggtaacagaaaagtgaaattcagagattgaggtaaagttaatttataaagaagctgcaagtttacatactccaatagccagaggtctctaactgattttgactgcacacttcatagtaaaaagttctttgagcatgcacctacaatgcacatatatttatttataaaaaatttattaataaataatatatatgttctgctcattagcatcatagcactatcaaacctttagaaaattaggaaatgaagtgagataaagataaaatagcatcttgtatttgattttacaaatgagtgatacaaaacattttactatcaccaagaaaattattataatggtaagagtgatgtgctagaattggttttattattgtttaatacatttgtttagcacttagtgatacaaggctctaaggtctaaggttcaatttatttccatactttgttttaatggctgtcataactgaaaaggacacctcacatagacgcagagatgcaaaaaagtgcattgttggctgtgctgaataaatcaagattttttttttcagtctcatgcaccaattatgtgaagactgttgttgaaattcagctagtagatttccatcttctctgatgtcaatcagctcttggaactaatcggagggtgctgaatttttatattttttaacaaaggggtcaaaattctctgaaactcttcatttggaagatttttaagcaggtagaagattctgtttccaagttttaaaagttttaagatatgaatttttaaagtgtcacatttactcattattggcaacaaaatcacataatgatgaaaatatttccaaacatcttttctctccccaaatgatctcctcatgccataaatccttctgaaagtacttactttcttacccattgtgaatgtattacttttatattggagggaaagattaagtgtttattttttcaaagttaccagcaaagtggcatactctgacagctgcttgtcagaactgaaaaggtcagcaaatgtggaacattttggttcttttaaaagaaaaatgattaattatgtttccataagcagcagacctctgtgttgtacaaaaaatttccgtggtcacttgtacatcattgcaaagtattataaagattttatttaaaggattgtttttataacattgataatatctgtcacacataaattgcaaatttgttgtagtatgttgaaactgactcagccagtgaggatgccagtgtcaagccctccaagatgttgggttcccagcatctctgtgcctctctaatgcatgaatgactgatgcatagaccaagggaggcagacactagctagtatcaacactatattaaacacaagtaaaaccagatttcttgttttaaataaattttttttattattatactttaagttttagggtacatgtgcacaatgtgcaggttagttacatatgtatacatgtgacatgctggtgtgctgcacccactaactcgtcatctagcattaggtatatctcccaatataggccaggtgcaatggctcacgcctgcaatcccagcactttgggagaccaaggcaggtggatcgcttgagctcacgagtttgagaccagcctgggcaacatggagaaaccccatctctacaaaaaatacaaaaattaattgggcatggtgatgccctgagactaccctgcatgccctgatgcacacctgcagtctcagctacttgggtggctgaggtggaaggatggcttgaacctgggaggcagaagttgcagtgagccacgattgcaccactgcactccaggcttatagcctgggtgatagagccagaccttgtctcagaaaaaaaaaaaaaaaaaaaaaaaaaaaaaaaaaaaaaaaaaaaaaaaaaaagaagcagtagttctaatagtttctcccctttcttcatcggagagtgttccttcttagcagcccttggcatcaaaatgcataacactaaagaggcaaaagggagctcagtgttttagagtttggtctctggtattctggagcaaaacagtaaataagtagcctcccctagattattgtgaagttggggatattgggtcatcagcattcaactttattttatttatttattttttgagatagggttttgctctgttacctaggctggagtgcagtggcaccatcacagctcactgcagcctcgatctcctgggctcaagtgatcctcccacctcagccccccccaagtaactgggacctacaggcgctcaccaccatacccagctaatttttgtagagacaggatttcaccacgttgcccaggctggccttgaactcttgggttcaagcaattcactggcctcggcctccgagaatgctaggattacaggcatgagccaccgtgcccagctagcatccaactttaattgtggaagacagagtaataaatatttgacaataaacaatggctcctaaattaagaacatctgagaagatgcaaagtgatacatgaattcctgttgagaactatgtaactggcagcagtaggaggcagacttttaataatagtaataaaatgtgtgccttttggaaaagaacagtgaattagagactgagagcatggactaagctcagaggtgaggaaagcttcgcagacctaggatagagagatacgatcctgggcatttgtgtgagcatgagcaagccaaacatcagttagtctcaaaggcaacagctgcccggacttcaaggggtaaccctgagaatctgattgatgaagagaacactcctttccccaaatcgcaagaagaactcagcctgtgctcatgacagaacagcacacacaaaaaaagagaaacttgggtcaggcctacagccagagagactagccaaggaaaaggtagaggaaaccaggagagctgggaaaagatagttaagtctttcccagtgaaggttccacaatgcaccaatcactctaggtgctcctggtaacatgagttctgtggccaaatgactttgagagatactacttcctacatttgtcatctcactcatagctcagagattcataatacccattagtatattaaatgcactatcaaatgctatagtcaagatatccacttaactcaagggctggatagagtggctcatgcctgtaatcccagtgctgtgggaggccaaggcaggaggatcacttaagcccaggaggagcccagcgtgtacaacacagcaagacctcatctctacacaaaatttttaaaaatttagcttagagagaaagggcacctgtagccccagcgactccagaggctgaggtgggaggatcatctgagcttaggacttcaaggttacagtgagctatgatggcaccagtgcactccagcctgggtggcagagtgagaccctatctctaaaaatcttaatctctacatatctatacatctgctcaactcagatttgctcaaacatatttgactaaagaaagcttttgttttaaaaaaaagtcctgcagaatttttgttctaagaaataaagtttgggaaatactggactaactaactgatgcttaaatctgtaccaaggcaaggaccagcaagaggtctcctacacgtgtcatgcttcatgtgaatatcatttgtctcttgagacccccacactttaatgagagtgaacatttatttcccagcctgtggattaaaaggggttttgagggaatagaactttctccagagggccttcctctcctgctgaaggtgatctcaggtgtgagtagtggccctagccaaaggccacgtctcagggaagggggttgggcacctctgtccactagaacacccaaggggccttggaacctgtggactcagactatgaggccagagccaaccaggagtggggccgatggaggcctcctggtctgctctcggtcactcttggcaccaaaaacacctaatacgctccagaggatacatgagtgagtttatgaatgatggaagaaaaatattacaggtggatttctttcttttcttttctgaaacctcccccttccaggttcaagcaattctcctgcctcagcctcccaagcagctgggactacaggcatacaccaccacgcctggctaatttttgaatttttagtagagatggagtttcaccatgttggccaggctagtctcaaactcctgacctcagatgatctgcccacctcagcctcccaaagtgctgggattataggtgtgagccaccacacctggcataggtggattttttttcaataaaacatagacattcttataacaatcaccagcatactgaaaatcatagagatgaaagctaagcctcattgagttgtcattatgtgccaggcaatgagctaagaattttatgtgcactttcttatttattcattataaccacccagccaatgggcactaggatattcccattttgtcgatgaagaaacggaaatacgcagagattaaataacttgtccaaagtcaagtggcagagccagaatccggaagcagagctgtgattctagccctgaaccaccttcaagccacccagcttgcaactggatagccttctgcaccagctggaatccttttggagaaggatatattctctacctgttcctccacctcttcattgtttttctggactttgtctaaataagtattcagataatctccccttagccattgtgcatcccttcaaaaccatcgcatacgtctctgagtcagtttcaaattgatgtctccattgtctgcttgtaatatctgaaatgcacttgaaagactcatatgagatatgtaaataaatgccatttgtaatttacccttttatacctatattgcatttagtaaagtcacatgacatcattaatgctaactagtcatcgtgaacaagggcataaattaatgtgcatcaatttacttttgaaaacgtcccattgatattcaaacggagtgtaaaatgtacttaagtatcaacatttctggtctgttttccacagaactcaagagcaagtcaatcagtgctcatggaatttaactatttccattaggataccatccctaggggacaggggagtgggttggaacagtgtgagtcaacttctaccaacacctggcctgttgagaggggtgaggtggtcaaggcccacccaccacccccacccacaaatgaggatcagtggtagtcttaagaaagagcccaaagactccagcctccagaccagagtccttgtaatgacctcactcaaaagcgtaaggagaatgtgcccttcaaactgacatctttttcttccctgatccctaactccatgagaaagttgggtttctggagcaattcccacagcaggaccacactcttttcaacacccttcaagctggagtttgctctcactttaccactgcagagcttccagaacaaggccttccctcggcccttctctgattgtgtacagggactggctctgtgtggggcatgcagtgggcgcttactaaacagacatggtgggacaggagctggaagctagcagagaagcagccctggccctgtctgtccaccctgtggagtctcctcatgtgctgctaagtggatgattataggtggttgtctttaaaaatggcacttagagtgccccgaaagtaacaggacaccggcgctaagttaggagaaggcgcaataattgtcaggacaattgccagagacagatgcttaatggagttcaggattagagacctgccagcgctttccttaactactggcccttgggtttcctcagcttttctcctgctccacatcctccctcacccacccctgctctacctccacatcatagctcttcttctctattctggggcagagagaaggaaaatgagccagttttccctctgctctagaagtcctggaagatgagggaccaaaagtttcttcagctacccaatctgtgataacttcatatatccaatgaggttggactcaaatggattcagactccttccctggagtggaagcagagttacagagaaaaatccagagacaacatagctctctctgattagggtgggagaccacagcctcctgggccctccatcccctggaaggcagtgctccttactatgaagggagtctctgcctgagtactttctagaggctttgagatgatagataggggaagcacagaatcctgggtagctggtgcctggagctcaactggcctttagccaccaagcagtggtttgtccaggcttccctgcccctaacaacgtttttgtttgtttgttttggacatagagtctcactctgtcacctaagccggggtgaagtggcatgatctcggctcactgcaacctctgccgcctgggttcaagtgatgctcatgcctcagccttccaggtagctgagactataggcacgcacaataaggcctggctaactttttgtatttttagtaaagatggggtttcaccgtgttgtccaggctgttctcgaactcctgagctcaggcaatctgcccgccttggtctcccaaagtgctaggattaacaatacattttctaattgtaataagaataatgataatgatgacagcaaccacaacttactaaaagcctactacgtgctaggcactttacatatattaacttcaatcctaaaagtgctgaaagagagttatcatcactttaattttctacataaaaaaccaaagcatgaactgcttgagtgagttgctccaggtggcacagctggtgagtactaaggacgggtatgaaaagccaagtccgtgatctgttcatgaccccccccggagcctccatcctgcacatgcttatactttctggtcacccccatggtctgtctgagagatgccaggccactgtggtgatcatactcagatgtcagagacttttgcctacaccagtgaccatgtagaaacacgtcagtcagaaaaaaacagtgggggtggtgggctgctaccctgcctactccctctgtgaggtgaggctggtgccacccagggctccatgtaccccgggatgccctagaggttgcaaaggggcacttgtcccaccttgtgtcaggctacaacaaaggagaagtaaaccaagggacctccttcatggggccgaggctggttctgagttctgatcacatctgcactgctccaccaccccatccccagagactccttctgccttctatggctggttctgacacccaagagtggggcgtaccactttttactggaaagtcaagatgatggatagtatctcttgctctcacagagggctccccattcctcgttggaggagggggctgggaaaggcattgcagaaggagctgagccctatattcaagctcagctcctcccccaaactgctggtgactctggatgacctgctccctcctctgtgcttcagtttccacactgatcacaaagtgcagtaggagcgtgttgcgccagataagccagtagcgttttccaggcctaaggttttagggtacagtggacaattcagcacctactgactgtaggaaactagggagggaagtcacttcccctctggttcctccagttctgccgtggtaaaatgcagacatcctgccttgattgagaatgaagtgggaagtgggaatatctcagtaatgacattctggaaccttcagaatctgttccagacaaatgggaaggctcccacctgagtgaaattgggtgaaacattgagacagcttttctgtttttgtgaatgtctgaggtggctccatttcctgtcactcattcctcagccctgtgcttcaagtttgctctcccaggagctatcagacataggccagcctgggtgccaggagcaaacatccacgtgggcttgtcaccgtgtcagccatccaaacactaactggagtgtacagctcggcccccacaggggcagagaggatggcagagagacggttgcatcaccatccagtgcaccttacatgagacatgcccacagacacagtgctgagggcaggactcattttcacaggagcccagcacctttggctgcagacagtatctccacaacagcctcttctatcaaatcaatgtctatagacctccaagactgtcagacttcacatcaccttcctcagaacatcctgggaggcagggtggagacagggacagacactgaggtgcaaagaaatggtaatgactccttcatcacacagggggtccctggtggaggcaacatccacttaggggtcccaagcctcaagcgatgctgccttcttagaccatgatactacctccccgttgaactatagctccttctgaagctctcagcatggtaaaaaacaatcacgatgcctcctctcacctcttccctccagagaggctggcttcactatctttcaatttcacaaccccaaacaaagaacttgcaaataaatagaagaaggaaagggacaggacaacatggacaggcctccccttctcctcttgtatgcccatctgaccactctcttttaaaatgcaaccctttcaccctcacaaggatcctgactccacttaatccacttgatttcctttttctggagtgtttatcacctgctaacctagtctctgatttatttcttaggttggttccttctttgctgcttccttttgctaaaagcatagggatatgtcactgtttcttcatggttgtattcccaatgccttgactggtgcttggcacatagtaggagggagcttagggaatgcatcttttaaaaaaatttatttttatttattttttttttagagaagtcatctccctctgttgcccaggctggagtacagtggcatgaccacggctcattgcagcctcaacctcctagattcaaataatccctctgcctcagcctcctgagtagctgggactacaggtgcacaccaccacacctggataatttttaaattttttgtagagatgggattttgccatattgcccaggctggtctcaaactcctgccctcaaccaattcttctaccttggcctctcaaagtgctgggattataggtatgagccacagtgcccagctaattaattttttttttttttagagatagggtctctctatgttgcccaggttgatctctgtttcctaaacgaatgaatgaatcaggcctgagtaatatgctataaagcaaggtggccctcgccacttcactactggtttacgctggaaggagccaggcaaggctgctatcctgggcaatgcctatgggcagggaactcacctccaggcccacctcctcaggccccacaggcgtccgcatcctgctttatagcaaggacttgagcaccggcagctcagaaggacaggctgcaggagtcccccagcacctggaagcagacccactgtgaacaggagtcagtaaaacaaaggacaccataaaagatggctttggtccaaacatcgctgaaacagatccccaaagcagaaatgtgtgtttgaggcttctggcttccaggaaggaaagggctggtgtgtggagaggcagatacattgaaattcactgagaaatctgccacttcctctgggtctatcaaagaagatactcgccttgtctgggggacagctgcttctcccctggtaggggtcactccagggcacccaagaacaaggatggtcccagctctgccacctcatcttctcatttatctgcctcactgacatttcccctcacctccttcccattggcttggcaggtttttatcacactggtttcagtgtgtatagacattcccttggggttactggaattttagtaaatacacaccacactcatatacatgcatacacatacaaagcaagaaggaggctaacagagacacacagacagggatagacacaggggaaggggtgggtgtgcatgtgcacacacagctgagagatatccagaatcatgcagaagaaagaaaagagacagagagaaacgtaacacggctctgaaagagacagttaaatcatgacaaaatgacactgacacttaacagtgcacactcgtacactccaagcagaagtgtacccggaacatggcatttgctgcaagagctcacagagggacccacacgtccatgataagagaaaccatatccaggctacagaactacgtaatttgcaaataatctaatagctaacgtttgctgaatgttctttctgagctaagctcttttacatggaatatctcattgaatcctcactcactccaggagatcaatactgtttactaaatccccatttcacaggtgcacacggaggctggggtgatctgagctggcctctgtcttcagctgtctcactcaccactttcccccttctcccctcctggcagcccgtccggtgtcctcaaaaacacatgtcacatgccgtctctggcctctgtgcttgctgttccctccacctggaccacttctccccagacggtcctctcgcaccacttcactctcttctgctttttgctcaaaagttccctccttggagaatttcccttgcaaccatctttaaaagagcactcccctccactcttctggccatcaccttatttctcctgagtcggtttaatttttcactctgttcactattacctgatctaagccattcactcattctctcattcgctgtctctctgcccagaatgtaaggcctataaggataaggactttgcttgtattgttccccatggaattcctggtatcctagaagaatgcttggctcagagcaggtgctcagtaaacatttgttgaatattgaatgaataaggtgctgagggaatgggtgacagagccagaaaatatgtagcatttgtgtgcagatatgcacatgtgtacacacacacacactccattctctacctccattagtcatataatccttaccctgcatgtcgagagctggccatccattcatcctctctaccatgcattcatcctaccacatgccaagagctggcctatttcagcatatggaatgaggaacactggaacccaaggagagtttatttatttatttattttttgagtcagagtctcactagtcacataggctggagtgcagtggcatgatctaagttcactgcaacctccgcctcccaggttgaagcgattctcctgcctcagcctcccgagtggttgggattacaggtgcatgccaccaggctcagctaatgttttgtctttttagtagagatgggtttctccatgttggccaggctggtctcgaactcctgacctcaggtgacctgccctcctcagcctcccaaaatgctgggattgcaggcgtgagcccccacactcagcccccaggaaagtttcaaacagcagtggggagtcaaagttagttgatctctctggatacttctttaactatggattcattaactgtttcacgactactaaaatatgacgcaaaatatttcccctgactgtcaaatgcctctttcctgcactctgtgtcccccagtgtggtatcaggtaaatcagagggaggctggaggtggcagagagcagcatctccatccacaaagaaactagggacaagaagggatgaaagagtgtttagaagagagagcagcccctgcccaccaaatggtaaagaggaacattcctcaggggcagaggtaacaccctagatagagcttgccgggttgctgacgaatcaaagttatctggttcttaataaaactcagaatcctgccatctctatttaagtcttcaggcgtcatctccaggcaggaggtcccagtctcaccaaaatcagagtgctctcaaagaagggctgctcttcatcacaaacagatgaagtccaaagctcattcactcatattaactctataagaatatacctggccctttctctgggtgaggtcttcctctacctgctagacacaagagagacaaggtccctgccctccaggaacttatatgctaattcatagggatgggaaataaacaggtaattttcatactgtggtgggcagcagaagggagtaaacaaaaagacttaataggaagaagtcaagattccagggtgagggatatttatgtagggtggccagcggaggcctctctgaggacacgatatttgagcaaaaaccacaggcatgaggagggaccagccacaggaaaagccagagagttttcacagcagaggaaacagtaagcgtgcaagttctgcagcaggaaggagctgggctcagggacagaacaaaggcctgtttgctggtacacggagagccagggtccagggtcacaaaatgagcttgcagaggtggagatgagtcacaggatggggccaagggaccatgccaggagcttgggccttatgccaagaatgatgagatgcccctgatggtaggaggggtccatgaacacccattctgttaacttggaaagtgctcacaagcctcccgattcagttgctcatctcttcgcctgttgtattagcttgttttcatgctgctgaaaaaaacatacctgagactgggtaatttacaaagaaaaagaggtttaatggactcagagtttcatgtggctggggaggcctcacaatcacatcttacatggcggcagggaagacagaatgagagccaagcaaatataaaaccaccggatcttgtgagacttattcactacatgagaacagcatgggggaaaccacccccaggattcaattatctttcaccaggtcccttccacaacacatgggaattatgggagctacaatgcaagatgagatttaggtggggacacagccaaaccatatcacctgtcattgtattgaacacaacaccaggacaaaaaggttgtttaggccactgccctgctgcagataccaaacagatcagagaagagagaggctggtatgtaagaatggacagcataaagcacacattttctaccaccagtttttttacacagtgatccctgttagaaaatgtgtccttcaatcccatataagcctcctggattatcatccagattgccactctcacatatgtttaggatgcccttccactaagatctgggaatacaggtgctagtatgtttcatgttagattttagtcttcagttataggagcaaccagagcaccaaaattgaaaccacagctctcttgagcccagatccatttagtcacccattccacaaatgtgatttgagtgtttattaggtgtcagtgctgttctaggggtaacacacaagtaaactaaagagactaaaaaacaaaaaatcatattcttatggagtttacattttaaatgaggaagacatataatacagaacaattattaagaatcatatagcaaataagaagagactaagtgctatggataaaaatagagccaggagaggagattgggagtttatgagtctgagtggaaggcaatctagagttttacctgtggtactcaggggacgcagatacctggatagaattccaggcaaaggggaacaaccaggacaaagatcctgaagcaggagcctgccatattgcaggagcatcacagaggacatttctgtgtccagagcactctctcccgccctggccctgcagactaggggagcagggagagcggggagagcggcaggtgatgagcttggacatctcatgaggacagagcatataaggccctgtgggtcttcataggcactttggtcattgaaaggatttaaacggaggaatgacactatctaactcaaacttttgaagattaactgctgcatggagaaaagactggaaagacaaaggtggaaacagagagagtagttggagggctattgcaaatattcaggcaagagaccatgggggttcaatccaggtgggtaacaatgaagtggtgggaaatagccatattctggaaacattttgtagagtccgtagaattatgggagctacaactcaagatgagatttgggtgggacacagcaaaaccatatcaaggtgtttatgttaaaatgaggctgatagagagaggccctaatccaatttgactggtgctcttagaagaagaggcgagtaggacacatagagaaacaccagggctgtgcacacagaggaaaggctatgtgaggacacagtgagaaggtggccatctgcaagccagggagagaggcctcagaaaaaaccagccctgctgacactgtgatcctggacttccaacatccaaagctatgagaaaacaaatttctgttgtttaagctccccagtctgtgctattttgttatggcagccctagccaatgaatataagtggtagattactgacatgcaggaagtgcttcccttatctgacttaagtttgaactttgtaataaactgaagcaataggttatttgtgttggtacctctcttttccaattctggttcaatgagggcactggggactcattcattaaaaaattaagaggggcctattaggtgaagtttaggctggcaaggcatcggatgctctcaagctgctggcagcaagagagacaaggaagtcataatcacagcctggtctgacaagagctactatagacatgtctaactgcaggccaggaatagtccaatgaagaatgtgacagccgagctaagttttgaaggacaaggaaaaattagtcacataagaaaggaaagtgctttccaggctgcactgacatcatggctaagctatgcccttagcctgcagacacagtgtgcaacgtgttctgacccatcatggctgagggagacccaccacctgaaggaggctggaattagtcttgataccctgggtctggaaaatacccaggtatatttatcaagctgctttgccctgagctctattccgcatgcccaacctgtcaagcaggcctgggttcctgatgcgctctcccccgggactggatttttgctccctgcctcccttggcctcacctgggctgctgtgctccaacccagatggaccatctagaatctcaataccagcccctgcctgactctaagcacggccagtgtctggaaactcctgtcacagagtcataaaaaacaagagtctctccatttaacaagcacttactctgtgccagccatggttctaagcttattatatgcctatctcattcaattcttggaaaaaaactatctgatattattgtcaccaacataggacagtaaagaatgctgaatcttaaggttaggaacttaccagagactacatttagtaaatgagatttaagattcccactcagacatttcaatggcaacacctgtggacttaatcattgcactgttctacaaatctccaccaagaatccacaagcccagtggagaccagtgtcggcccaggtgttaggcctttgagatggtcatttgggtggcaggccagtctccacatctgtgtggagcagccctggaatggatgaacaccctggctctattcattcctgccttcctttccaatgtgcccataatatggagttctcaggatgcctcattgccaagcctgaatggacagtgaccacattacccatccaaggggaaacagctgaggacaaagaggtgaacaaggattcagatgggcacctccagggaaggagtaatgctcagaatgctgactcagttctcaaagggggctgataactcatattaccagcttatactttgtttttttgtttttaatttctctttttttttttttagagacaaagtcttgctatgttgcccaggctggccttgaactcctggcctttcggtaatcctcctgccttggcctcccgagcagctgggattataggtgcaagaccctgcacctggctccgtttatattttccgtctttgaaagtcctcttatgttttaagtcccaggttcagaaatgctggctttcagatcaggcaagaaatcttgaatattcaatgccttgtgaagatcttctccagatgattcatgccaccaaggaaagctgcttcccctcagctcctagggcctcagaggtgggcttggagtggggagtgtggaagctgttataaaagcaaggaatgcagacaaatgggaagcctcgtgcccagctgcaggctccatctcggtagtctcccctcccaggaaaaaatactccattttccaccctaccttgggaatgagaccattcccaagccatggcagcctcatccagggcacagtgggtcccagtatggctgaagtcgggagaacggggagtctgacaacaggagaagatgtcatcgagctcttggggagggcagagctcctgtgactgttaaggcataatgcacaagccccgtgggtggcataatgtggaattcatctcccccacaatgccaagagggtccaggcagaacaatccagactctgtcagcagggtcctccagagagttcaggccacgctgacgaggatgaaaaagaggggagatctgcccctcatggccgctgctgccactcagagctaacgcatacatattcatgggatagaggggcagctcccgagaatgacccatcctccacagaggccacagggcagaggtacagcagtgctgcacctcacttggggtgggctgtgtgttgtggggtggaggactccaggaaatacccttaaatacatggatgtccaaggtgaaaccccttcctttgcctgctgcagacatatgactcctggcctgagctcagggactccagaaaaactcacttcgttctcagctcagtttgagaaccaagcccaggttttctacttcctactcagcatcagcaaacctgcaccatatctgttcttctcgggtgggctccatggcatttgctggagtttccacaaagagttgtatgtacacacaaaagttcaggccgtgccctaccccatcacatctcatcacacagactgttttctgagtcctgaccatggtgttcccttaactacactcttttggcaataaattcttgatcccacaggcttctgggggccaggaaggtgactttggtatgaggtagcattttgtatagggaaatctggacccacaatttgggcatctgtacgacgttccttcagaagaaagcaaatgttggccccgaacatatatgcatgattttgaaattagtggatttgttttagactctccaatattttgatattttaaatgtttctttcctgtttcagaacaccaagcctcagtccccaggcagcataactgaaaagtataactgaaaagatacatactacgccaaataaatcaaatcacctctctgcagctggcctcctaaggtttgtactgagccacaggctagtatttaactgcaagacaaatgtctagcggagcccgaagagccttacctgcctctctgacatgatgtagagttgctcgtggtccttggagaaggccatatcccggaggactgggccggggtccaccacctgcaccgtctcatactggagggcgttgcccctgggtccatccacccggatctgtggagaagaagaggagagccaaagtgagttcagatcctgcactgcccacagccaaacttcagccaaagaccctgtcaacagccaagggagagggcatgagttctgtctccacagtgctcacaggctaaagccaaggagtggagtgacataagctcaccaagggcctcaggatgggagtggcagagagggaagtgggggaccaagctgggcttcaccaagaatccagtcttaatctccctggttccctatgcctcaggctcaagcatttgatgcctttcttgctggtctttggagaaaaagatgaggctctgaggcttggaggaacaacatgtaattgaaactgcctcagatcagagcgtcaccctgcattggaaaggcaatattatttgctgcatttgttagcagaaaaacatgtcagtgtaaggatgggaactgctacctggatgtcattgctgttccttgaaggtgaaccaggcagggggccaaccccaaaggtttcacactaagggtctctttttttgccattgaaatagtggcttatacttataccattaggtcctgaaaccttctagaggttttgttcacgtccccagcaaaagggatgtgggaattacaggaaaatgtgcttcaggcatgagtcatccacaaccttctgcaaacactcagctgaatagatcatccccggccatccataagtccttcctagaaatgctgggacagcatagagacaatggaaagaagacttctgcccacatgccccatgaatgagaactaacctagaaaagacatgagctttccaaccctacatgatgctcatctggcctctggatgttggccaaggtctctggaaacatcctgtgtttgagtgcatagatccaacatgaccgctgcgcagtcagtgctaaaaacaccactcccataaatcaggaacaaatattactgagagtgtggctaggcaagaactaggggatcaccacacttccctaccacatgcacaactgtaagctacacataacgtaattttagagatttcaacaataaaactaaagaaaaaaattatattccaaatattcccattaggcactcttatttttaatttttaatgtataatttttaacctctcacaagatcaaggagaataaaagagtcattctgaggaactaaattacagaaagaacaccatgttaatgacaactgaccacaccaggtcccccagaaggctcccacctttcatttctcttgagtccatgaactctgatatcaggttattttgtggtttatttgcttgattttgggtttgttctggactctgatttttaaaatttccttttaagcattattttcaagcttcatggacatcaggtactgggagatggttttgcacataattccttattgatataatcctctcaatcctgtgggtttaatgttcattcatcacggctcatgtgtccctccagcatccattccaccttctcccaccttttgggtgggattgaacccactccttgcttcccaggttgtccgtgatgagcataaacaaaccagcttgatcttactctctgccacagtgattaagagaaaataggctcaagccaatcaacgtgaatcagagcaaagcagggactcatggtagaaagaagaggccatctttcttcactctcaaaggggtagaatgaacttgcggctcaaagatctgtgggcagccctctcctaacaaggaagggaactggaaccagggcaggtcaaacacagagatgggaaaatattggtctttggtgacatcgctgagccactgaatcaaagtaaccccaaagcctgcctgacattgggacttcctagttactgcagatattttctttaggttaaagtaatacaaaggttttttgcaacatcaaaagtcctagtggatgcactgataatagacaagaaaaatgatacccaggtacattaaacaagtggcctgtgggataaaatctggggacagaattagaattcagtttgactctggaagtccatgcttttcctaccaccagttacatgagagtccttgctcccagagggtttcctgtatgtctcccggtggtggccacctaaaggcagggagctgaggtcagggtctgtctctagtctgtacaattcctgagactttctctagtcattcttgattttggtgctcaaacacttgaacctgacaaatatttattttaaaaatgaataaattaatgaatgtagttcagattcctctttgatggtttcccattaagcccatgaaaacaacagttaaaggatttaaggagtcgtggttagtgtcaaaaatggaaatgcctctgattcccagagccttccttcttctgtgcccaccccaagccaccagatgtccatgctggccaggtcctttcctaatctagatgaaacaggagttcatgcaaaaccaattgggattaccacccaagtctgaccgtgcaatgatggccttggcccctggcccagccaagcttcatccccagctgggaggtgcccctggagcaggagcagagagtgatactgaatgccctggctggtctccagccccctcaggccaccgtcggccagagcagggtccccaggggagtgctggcggaactaagctccatccagtgccccttggcctgatccccaaatgaaattacattcagtgcctgagcagtctcctttatctttcgactccaacttcactgctccttaggatgaggggtttgctgggtgtggctggacatcaaaggaagccagttgacttgggggatggacagaggggtggatgaggaagcaccaactggacaaggttccataggcctggccttctgcaaggaggctggatgcagattagtccccaccctctgcactctgccagcgagaaatatgtaactggaaaggctccttctctcttttcccaccccaccctccaacaaattttcagaaaaccaaagaaaagcattatttattcatctgttgaaaaaattcacacaagacatggataaaggagtttatggtggaatttactgaatgtttgatgagcaatacaaaaatttaggtagaatggaccagctgccggctcttggacccttaacatagacaaatagaacaagagctgttatttattgagtggccactatgggtctgggacaatgataggcattttatatatatttattttcttatttaaatctcagaactcagtaaagtaagcattaatattgtccccctttataggtgtggcacaaaaaaggttaaataacttggttaaggtcacacatctggcggatggcacaggctgcacccttaccagggtctgattgtttccagtggtcatgcttctatgagttcacactctacaccaaaggctcacactgaatccggcactattgtttatgtaaacctgcattccttcaagacgtcaaaggagttgattttaaacaagcatcaccccaggggtgctggaggagccatgtctttatctactgcagttctgggagagaaacgtgcatatgaatgaagatgctgttgtaaattttctaaataatgatcccttatatttttgctttataccttgcaaagcattcttaaataacactgtctcagctgatggttgtaaaatttttatgatgttgattgccagaataatcattctcatcttcctgatgaagcagccaagatggaggctgttctgtgccttgccccaagttcaatgataaaccaatggcatataagactagaacccaggtctcctgattcctagctcagtgcttgtctcttagctatttagattttccagaagcctttgacaaggttccacatgaaaagttatttaaaaataatgagtctccatgggacttcgggcagtttggccatggagagagagaattgactaagagacaggaaaagacagatttctgcatggagaagtaactagtgttacgactagtctcatttaatattttttataaatggtctggaggagggagcaggaaaatgtgcaaatgattctaaactctttgggacagcaagaaggccaataacaaaggtgaactacaaaaaaaaatggtccaccctctgcaggggctgacagttgccacgtggcaaatagccctgggaccatgagtctcccaaggaagaggtcatgcctgctgtactcagtgcaatccccaatacatggttggtgcttagtaagtaattactgaataaatgtaaaacaaccacagtctctaatatctgagctgctagttataatcgaggtaagagtcaggatcgaggaagggatcagagccaccatttactactcccaatactcgggcagccaaaaaggcccacaaaatgttaggcagcatttaagtaagatttcatagaaaaacagacaagcagaagccatcatcttggtcaagttcacctgaacatacgagatcacattcagttcaccgctcataaggtaggaacacaatccagatgcctgcaactcaagaacagcctaggaaagacagcccatgccagaaagaaatagttgagatgaaagaagacacactgaccagtggccatggttcagtcaccaatacagaggccaccccaacacttgtaacatgacaacttgaacaaattagatttcttttttgtttgtttgtttgtttttgttttcagacagattcttgctcttgttgcccaggctggagtgcaatggcacgatctcagctcactgtaacctctgcctcctgggttcaagcgattctcctgcctcagcctcctgagtagctgggattacagtcacctaccaccacgcccagctaatttttgtattgttagtagagacggggtttcaccatatttgccaggctggtctcaaactcgacctcgtgatctgcccgcctcggcctcccaaagtgctgggattacaggcgtgagccaccaggcccagcctagatttcttatttttacatagtatagatacttgtggatcacctaaacaatgagaaaggatgaaaacagaagttgatttttttttttttttttttggtagaaaatgtaaagaaattggccgggtgctgttgcttaagcctgtaatcccaacactttgggaagccgaggtgggcggatcacgaggtcaagagatcaagactatcctggccaatatggtgaaaccctgtctctactaaaaacacaaaaattagctgggcgtggcggtgggcgcctgtagtcccagctactcgggatgctaaggcaggagaatagcttaaacctgggaggcggaggttgcagtcagccaagatggtgctactgcactccagcctgggcgacagagcaagactccgtctcaaaaaagaaaatgtaaagaaaccaatcacaggtcacgaaggtactttggttgtttggaagatgttaatctctgaggatgacaccaaggaggaaaccacatcccaatcctgtgtgtcccttgacggagcgacacatcccacacccaccatgtgtctgttgaatgcccactgttccagagcctctcctagagagaagaggtggtaagtgccagccccgccttccaggaggcctgtctcctggagggctcagatttcacacaaataatgccaggtggcaaatgctatggcagaggagtgttctaaggcctctctttgttcttctcaggagatctagccaactggagtttaaccagggatgatcagcccagctccaggcgaggctagtgggcagggagcatcatgaccaagagctaccaatatggcatgccagtgatgagagcttgactaatacaacacatagcaggtaacgtcagatttactcaaagccaccttaggggacaaaatcttttagatcagtaggaaggctgatctgaagtagcaaaattagcaggactaatagatttcataaagacgtaacatactgagagaagggttagagtaaaacttggaaaaagggcgtctgaggggaagaatttgatcatcttcctgcagcatcatcttgaggagagagagagactagagaagatcagagagccactgtgtcctctgtagtagggaggggtgcccctgcaggcctcacctcagcccccgtagatagttccagaacagcactggacaatggaagatagtacaagccacaaatgtgggtcacatacgttatttaaaattttctagtagtggccaaattttacaaaacaagtaaaattaattttcataatatgtttaatctgacccaatataccccaaatatgacattagcatgtctacaagtataaaaattttattgagatattttacattcttttcctcatactaactaaacctttgccacctgaggtgcatgttaaacttacagcacagctcagtttggagcagccacgtttcaggtgctcactatgtggccagaggctaccatattggacagcacaattctagactattctctttcctgtgtattgattctgcattcaccaagtgaccttgctaataatttggtttggtgactatcccccggaggcatgctccattgagattttgcaaccacccccaaccccaaccggccctccctcccccctgtcctctgctgcaacccctttgtgtctcccagggaccttcaagctacagcacagtgcagtgtgccccattgcccttactttttgggcattcttgggctgtatgatccagccagctgtatggtccccatcaagtcagaatgctgctgcatgggcctcattctaatccaggctcatttgatgcacccatgccttctcttcccacactctgggcaaacctcctgcgcagcaggacccctggtacccctgctcgtgggaggggaccaaccagtcagccagaatcgttgctgtgggaggggattcttggagactcttacctgcaccaagtaatactgccttgggagagagtggtgataagtgggacacctagacggtggtgggcatctggggctgggggcagcaactgactaacaattgcatagatgcatttcaatattaacgactggtgaggccacatgagcacttaaggactgagcatcatcttgcctgtgccacacagaaacctccactacagtgttcagtgtgcactgcactactccacactacatgcagcttaccaagaacacacacacacacacacacacacacacacacacacacacacacactctactctgggtatccaggcatctgcatccccagccactcagtccctggcccgggatcttccaaggcagccagcccctttcctccagccctgctggccccctgccgatccaccagtgggcaccgccacctatctccatccctggcacggtgagtctccgcactgccagacagactgctattgaaacatcagcagcgtggcctccgcaaaggtcagccatccggggagctcctggcagctgcttgtttgtttattggaacattatctgggccgggctgtttatttacatccattgaaggattgaacaataaatatagtctcccagtagcaggcagatgcttgcactagagcattctggctgccgtcttgcttggactaatctccctaatgagcaaacagtgctattcatctctaaagatgcaggccacctctgcactctccctttcctctctcccttcacatcctccccaaacttcctaatggaggtctacaccttcgagatttgggagctgggcccaggtataagaatgcaagggtgggctcttatccaacaggcagggaaatagagctggaactgtagatggagaggggaacagagcaaacctggaggcatatgtcccagggcaaatctgaattccccacctagaccctcaaacctcaaacacagaggcacgtggcaaaccagctggtggtcaggacagaaggaggtcaggccttgctcacagggccagaggtggaggggcttgtgcggaggcgccccatattccagccatgccagagccagagttaggccttgaagtgcccagaattggaaggagatcccttgcaacaaaatgcaaaccagtcagtttgcaaaagggagacttcattggggcaggcagggataggtgaggagccgaaggagggaagtaagggggccaggtttggctcctctcagaagccttgagcacatgacttcagctctcctagctgtcctgagtctctctcctggctctgacctggctctcaaggaggcagcaacaaagatccttggcaagcaatgagtgaccagccgtatctctggcacacaacagcagtatgatctctctcaggagggagcaaactgtgagccatttggatcatagatatgcagcctactcagttggacccacaggttctaaatgatgtagccctcatcactgtcacttggcacctgaaaggaagaattagcacaccaaagagtgccagaatcaggcacagggtaagtactcgttgaatgaatgaatgaatggcctgagaagctgattctgggtctgagttgccacagctggaaccaggagacacaaatgcacactcacagacatgtgtgcacacacatgtatacacatgtgcactctctggctctgaagatggggccacatctcagctcaaacacaatctctagaattttccctttctcattctgcagaaagggagagaggacaggtgatacaaccgtgtctggggcaaagaagagctgggaagggtgcagcaggttggcagcaagacagatgcgaatacgggcatgaggtctgagtaacttggcaactggctcgttgtgggttaaacgtcttcagaaaggggaccttccttgtggaagagctgcctagtttgcaggctggtagactggaggatttctcagttcccatcagactctgatgggctgcaagtccatctccccaccagaggagctccctcacaccccaggccctcactgccaatatccctacaaccccacaccaagggcatctgagaataagactgcactcatagaagcacctcacatcttccccagggcttttgttttttaaaagtattccctcctgcctctcccctggatttccaatcccctctccccattctgcttttgctttttttcacagcgcttgtccccttctgacatactgtgtcctgcgttcatttatgatggttattgtttacacccttgctagatcatacacaccacgggagcagaaatctttatcaagggatatatctcagacccttgaactgtgccacagagtaggtgctcaataaacatttgttgaataaatgaatgaatgaaaacactcaaagtaatcatcttcgtgtttcttcatcctcatggtgtagatctcccctattttacagtgagggaaccagttaggggctttccctcactgtaactgggagatgttacagcaaaagtgaaatggaaactgcccagccaggcccgcgtggccggtaggtgccctgtttcgccagcagggtggactgtttgatgccacatccgtgccttcctgcctttagtctcagggcttggaaggtgggcgtaaaccctgcttctgtgttcatgctgcttaagctgccccagaatagctccatgaggtactttgttttgatttcctgattccagccaggagaaaggggatgcaaagggaactgcaagagtgtaaacaataattaattagacaggcagtgtgtgtgcacaaatcgtgtgccgtgttaccaaacactgccaggacaatcggtccctttgggtctcccattacacacattctcagagccaaataatgatttctatgctgccattaggaacttcttgccctgcgatgtccaaaccaaaaagaaaccagtgataatggcctccaaaccttccccacctgcttgagtggtgacacaaagaacaagctacaactccagaagagaaagatgctgaagaaataagaagggaagtcaatagggctgatataaagaacataccaggaaaaggttcaaaccagcaaatttcacatgtggaatattttgaaacagcttcactgagtgcaccattcccagagactcaccagagagcactgtgtgctaaagttacaggtttgaaaccttggtaggtcagccaccccgtgaccccagagccacaacttctttggatagcctgcatcctaaaatcttggttggccatttcccatgtgcctctggttagaaaggagcctgggccactcccactcctaggaaaacaagttcccatgaataggtggttaattcaccacctgccatgcgccacacaccatgccatgcactttacacgcatcagctccttctgacacctggcagatggaccatgctcatccatgctgcaaaagaccagaatcctgagctggggtgcactggcagcgcaggatttttgaagtccaggggcaaacagcgtgactcccaactctgacacttaggaactgtgcagcctcagacaatctactaaactttcctatcactttcctcatatgaaaaacagaaataataacaatacctcattgttatcattattgtgcaagtatgataatgtcccaagcatggataatacttggcagagtgagggggttttgataaatactagcaatgattaatgtgcaatgattactattcaaatgaatggatctctatgattttcatccaagcccactgagagcacaaccctgatataaagaggttagaaggtttctatatgtgccgtagataaagaggctagaagatgtggcctgcagattggactcccaacatctgacaagttcacctaagggcaggagagggagaagaggacccacagcttagctctgggctgtctgaagacaatagagggcagggaaccaggactaaagagtctgtgctctttagcatgaattgtacagaacaaaatggacccagagaacttcccgtggctgccctgaagctacaggaattgtctaggaaaccctgagtctgctttaactcaggagagactcagaaagccaacgactttatggaggaagaacaaagcagtttcatgcccatggtctgaccaagctgcaggaggggaagtggagaaccacagcctggcctcgctgagagatgcggcatctctgaggacccagggaggatggagggcagaggtggggctggcaggatgctggggagatgcagagccagtcttcaaaagcagagtcagtggctctgcatggtgtcaggcacagagacgcaggccagaaccaggaccgtcagctcctcatccacacgcctctattgcctcatcctacagcttggacaagccatgttcatctctgcccccacacatggggaggctacctcctctcctctctgcccacacaactgttgcagtgacaaaggggttaatgcctgcgagacaatgaggactgggaacaggtgtgcaaggatgctggggctggcacagtccatgttcctctcctgctggaaatctggcctcctctggagtgggatccagcaggtgcttcatgctgttacaccagaaccaggagaaaactcctgtctagctggaggcccaaagaaaacagaagtagagagaaacccgggaatccagggactcctgtgtgagctgctaccacaccttcaggagtcgtccaggtactaactcagaggaaggatgctgctagcacagagctcggcacagggcagagactcaataaatcaactgcactagcaaagggggacttcattgcagcctcagaagcagcttcacctccctctcccttcacatcccagatttaccagtaggcaccgccaccctagagtggctcccttataagctatagggtgtgacagccatgagtgtgtcaacatcttgagggcaggtcagtggtgtagagcttaagcctggggctgtgcaggcaaccaagctcgactgctgattctgtctattatagatgtcgtaacctcaggcaggacttttcagacttgcttagcatcctcagctgaaacacaggtctcagaatttggagctcagagctgccgtgaggatctcatcaggtgaattgtgaaatgctctcagttcagcacctgatacatgcaatatacatacgtgcctgtgagctgtggctagttaatacgtagccgtgcctggttagccaatgtgaagatgaagaggagataatgtgatgctgatgatggtgtagcagagcacagcttcccctagcaaggctccctggcagctctgggaacaccagttgcttaatagatgtgtagtaaattgacaaatgaacacatgagtcccattaacattggaaaaagatcagaagggtcccagcatcctcagagactatcttccaagcttacatttctttgatgttctgtccttacaggaccaccaaacctctttctagcactaagggcacccgcagcagccagccctatatggctcccatcatcatcctgtctgcaggaagccccgtgggtctgttgctcagcccccaggcactgttctgcaatttccttgacaaataaataacccagggagtgtcagacaagtgcgtattacctcaacatctgctctccctactgggctctgccctaggttcttcccctgcagcctcatcaagctactggggcaccagcactttcaaggggcactgaggctgccatccaaggacagctgtgtgtgtgtgagagaggctaagaacagcccatgttcacctatgacaaggggcagaggtgcaacttcccagaaggtggaggatgcaacttcaacaaggctggggtgcctttctccattcactcctcatccccttgggaagcacgctggtcagagtggtgctgcctgacttctggcagaaatgatggagtttcattttgcaatgtcagtgcatttgcaaagccctagaacaggaggggattccagatttgctcagttgggatctataccaggatttcaaagtagccccagttcctgggctatctaggataattgtgtgtgtgtgtgtgtgtgtgtgtgtgtgtgtgtgtgcgcgtgtggcctaaaggagggtcagaaggaagtgagggatgcatgtgacgttacccaagatccggctcatggaaaactgagaatctcagaactctccccagagtctcccggtatgattcggtgcctcctgtgggctccagcggcacttcctgcacaccttgcttgtgtcacttatatgcattgctacatggggtcatgagcgctcactgtcttccccactccctaggagcttcttgagtgcaggggctacatgttattcatcttacccaagctcactagccagtaagtggagcaccacactgaagtttacattttctggcttcaaacctgtactcagcaacaattcttctaaaagtaggcactgtaatgttcagtgtcaccagcaaaaacaattactagagcttctttgaagagtgggcctcactcagggctatctcatagatcaccaccccttattgaatccttcccctccccgtcccacacatctctccagcacagacactgcccacatcttactttttaaaaacagcagctactctgggaaagaaatacttggaactatcacaaatgaggacccagaaattcatgagtcctggggtgaggcatgtgaatagtttacagtcagaaaatctgttcccaaagagactgtggggacagccttccctgggcttagaatgctggagctgagaagggcatccctgtctggggatgacatcaccagacagagctggaatgcacagatgcagaaagctgggggccctggggccaggagagagcttggctggaagatcacaaaggggcttttgaccaccctcatcccaggaaaaaccacagagacccagctttaagccacccccgccctcagttgaggggcctaaagacatcctcctccaatcagacgggtgacctttgatcccagtgagggaggcaccagagccaaagtgccttgaaggaaaataataataataataataataataagtgcctgtatgggttactccttctgccagaagcctgtggagttagttgcagagaaatccattttaaaataagatattggaaaaccattctctccgtcactggccacagttattacaattatttatgtggcatcatcaaggcccatgtgtttcacagcaattaaactattgatctcccagctctgaggcactgagcaaaaacctacagccactggttctggtgctctgggagttgcctctccccatgtttcagatgtgaaaactgagcccggtggggaagtcaccaagaacaagagagtcaggggatggcacattaatattaatgatcaatatgttaatataatatgctaatggtatattgacatatcaataataatatatccatttatccatttggccagcacttactctgtcaaagtgttagtttttaggtttgcccaagaaattaataatgcagtgattgaaagcatgggttccagaggccattaacaagggcttctacgcagctctgccaggacctagctacatgacctttgggaaatgagtcaatttctctaacccctggtttcctcatctggaagatgcagataataacagtacctaccacaatcagttgacgtgaagatttaatgagttagtagatgaaaagcatttagcacactgcccagcacataatcacagctaaactacagttagcacttatttacatgaggggtccatggctactcactgacccatgacacacctctggcaactcatgttgcacagctacgtcattggcaaaggagagagggaaggcttaccctcctgtgagtcgctgcactgagatttgaggggcactgcattcttttttgatggtcttgaggcaggagctgcacctggacctctgtttgcagctgccccctggatgcacatgggggtggtcctgagctccaacctccctctctgcctacctcactatacctatgtccccatcacttttcctcaagcctagagtcaatattaagctagtaatggttacacaaagtcttatttatgaaatgcatttaaagtaatattatttaatgtgtttcaaggacatgttaagggataaaatgtattggatggtgggagtctgagactggttttgaaataattctccttcctgaacttttttgctacaggaagttgcatgtgcctggaacatacactcttatattgcatggtgtggacagggagagactaaaagtagggtgacagtaaaggactatgattcttatcttggtctagccaaaaggcagttggaatagagggtaaggacagagggagaaggagatggggcttgaagaatgaaggacaaactctggattgtcacacctgggtggccaagggaatggtgggcccaaggagcaagttgaagggaatgccgtgtgggtggaaagaagaagtgcgggtctgagatctgctgaatgtcactggtgggagtgtggccgattgactgtctcattgttttggacattcaggactgaatgtctgctggatgtctgactgaatgactttctgcttaggcagaaagtcattgcttaggacaattgagtcactgtcattttagaggtggattgtgatatcatgatatcaaatcatttcccggagccagaatttagacgaccaccatggcaggctggccctcctaccctgtctctaagggtcacatcagacacattccatagattacagaatacagattggaaaagtgccggggaaagggaagaacacaaatcactatttcctacttcccttcacgttgcccccagacactacagagggctcactaagttgaggaatagaatgttctcccacttctcatcccagaagctgaaataggctccatgcatgacccaacataaacttgcaaatgaataggcagtcactttgaggagcacaggaaagacacaccgatttaattaccttctctgcaccatcaccagggtccttcaattttagtatctgaggaacttttctttggattaaacagtttcacagaaccaaacaaaagtctcattttgcaccaaaattttcacaatttttgcttagggctggttcaggaacttctttccaaagtctatgtcaaattaaaaatccagaaatacctaccattatttaaaaaatagtagggtttatttcccacactgacctaagacttaaaacaaaacgaagccctctaagggttgagtgtgtggtgtggccccttctccccacagaccttccccttgggtcagagcgtttagtcggcctcatgccaatgcccatgaccgggggtgctggttcccttctgcttcttggggccttccatggttcacccccatcagagtctggaaagggaggccacgggaagtagggaagggaggaagaggaaggaaagggtgggagagctgagggttggagaatatcaagaaaaactgagattttacaggttgttactctggggttccaaaagaggtcctcacggaggttccacatcaccagaccctgggtcctgtatcagaactgtcctgggtctgcacgctggagttcactaactggacttccagccactttacttcccatcctcaacgtagaccaggaaaagtcatgatggaaagacttctttgttcctcctcagcccagcagggctctgatcatgccagcttgttgtgttgcaagacacgaaaagaagccagcaacaaaattgtcttgcgtcacttaacttcctctcagatttctaagcaggtaattatttcctctcctccaatggactgcaagcattttggagggtttttatcagagacactccataaataaaagtgtcaggttattaaggataatcttatccactctcctgagcaagttatccagtggaatattgtgctcttcctctgtggcactttcttccttgacttttccatttggcacctaagtgagccaggggaggatgtgtgagcaagggagacatttctgctactggggcctgggaaacaggaccagaggggctttcactccggtctgttctgtgtgacctctgggaggcttgttttctctagttcattccattgctgaacatgagttgagcatgtactgtgtaaaatcccacccagaaatgcacacatttcaaataagatttggctggtttctaccctcaaagacttcttgtccaaaacaagattcacagcacaatttaaaaagcagtttcacattgactttctaaatttaattcacaccacacatagtaaggacacaataaactttattgaattaataaatgaaccatgattccagtgagggaaggaggatgattatttgtactcatgttgtatctatgaacaaactaagactcagatgggctacatgatgctcaaagttagattatagctaacaagtgctggatctcattttcgatcagatattctggttaaaacccaatacaccttggcccacatctcacgcccctcccgagtgaagcacattcaaatgattgacttctgttctggtggccatggagaggaagcagtggtcaattctgaggagtgtgcttcccagaagagtggcaatgtgagctgattgttaggaggaatatgattcaaatagcaggagccatgaggaagaatatgtcctaggcaggctggcatgagcaaaggcagagatggaggaaagtgccacgtgtgtgcagtgtagggtagtcagctgtggtcagggcatatgacttttgggggcatggtgggagggaagcccagagtggtaggttggatgcaggtgcaaaagacccttgaatgtctttcaaagtgctgggctttaacctgtacacagaggggaagtgttgtatgtttccaggatgggggaactgatatgatctgactttcataaactggagataataagcaaagcatatcctactttttcaacttggaaaaactgctatgcccttgaagaggggcactgtcattcctttaacaaagtgaacgcccacttattgcctcaaatgactaaactaaaaaatgcgactctatcaccataagcctccctatgttgtgttgggaggtggattttattgaatcgtccacattctcccagttctcttctagtcaactttttgggtttaggttaagggaacaatacatttctttgcagcaagctctctaaccagagtttgggaaaaccttgatgttcttaacataaactcaatcaactgacttaaacgcatggaaaatggtggacttaggaggaacatttcattttagcactttacggatcaagtcactatgggatagagaccctaaactctcacaaacttccaggctaagattttaaaacatagatttaaccctagcctataaagtacttaatcaataatagcttggtgcctcaaattttgaaaaggatttttatgtacatcatttcagtgtgtcctcccagcagtattgtgagctgggtttgggaagtgtccttaggccatagctccccagcagatgaagaactaaagcctggatgggaaatgactctccaaattcatgacaccactgtagcttcattaggtctcttaacttctgaacctgttgttcttaccatgctatcttggcacccacttctttttaaataagggactggggtctcacaagaaaagtacacaatttagtcccccaccctccagtttcatcaatgcagagtgagatgagtaaaacagggtgctataagactgcctgttgcttgagcctagctgtgttgtgctggggttgggttggattggattgagttgtattgtgctgcattgggttaggttgggctgtgttgtgttgtattggattggattaggttgggttttgttaaattgggttgtgtgtgttgtgttgtgttagactggatttattggattaggttgggttgaattggattggattgtgttgtgttgaattagatttagttgggttgtgctggattagattgagttgtgttgtgttgaattgaattgggctgggttcagttaagtttgtgttggattaaatgtaattggattgggttgtgttgggttgtgtgtgctgtgctatatcatgttagattggactgggttgggttgggttgggttggattggattggattgaattgggttgagttaggttgtgctgaattggattgagttgggttgggttgggttggactggattgggttgggttgtgttgggttgtattggattgagttgggttggattgggttgggttgggttgaatttgattggattgggttgtgttggattgtattgaattggattgagttgagttggattgggttgaatttgattggattgggttgtgttgtgttcagttggattgaattggattgggttgcattggatggggttggattgggttgtgttatgttgaattggaataaattggttgacttgagttggactgaactgggttggatttactggtctgggattcactagcataggatccaaagtcttccctgattacttttattctgtggcattcagtgaccatttgcctatccttgcaaagctaccatgagtttaccatgaccaggttgtgtgcaacaagagcaaaatggagcagcacaagcaaaagtcagcacagcattgtggaacaccagttgtagggagcctctcagcctgctccctccctcagctggctcaggttacacctggccaggcaatttcagaaatgggtagggaagaaatccaagagcagggagtggagaacaagagccaggcagagcaagggtcggggccaggcaggcacagtttgcaggccagagaacattctctgagagcgcaagaatctgtgcctcctgggaaaggctgtaatccattttccctgaagacccgagtaacccggtcaaagaaactcaatcccaagtggttttgacataaggtcatgaaccgagacaaggcaatctcagcagttcatcccacacaacaagcaggcctgcaggcagggggactggagcggagagggcaggggtagcatctcagggccctggttgcagggggagggagttggagcccttcctagccagacaggtgattcatgtggacactctcacccttctgagcaccagagatcacaccagggtctgaccctctggcagccccatctgctcactaaaggggaaactgaggcagaaaagagcgcaatactgcccagaacccagagtgtcgaggaaaggaggtgatatcagtatgtgctcacttgctttggacacttgagagcgctaagctgggggagggtcagcttctccagcctcctggcttcctccctccctgctttccctctccttccccagggctgggagccaagggatgcctcagctgcaggactctccctccccaccccctgcagaatgagcgtttccacaacttgcacatctttacctcctgtgtttaccggaaaacaggaaggaaggagggaagaggaagtcttttcagagcctctggtgatcatcacgcactttgctttttttttttttttttttttttaattcttctcccccactccaatctcatctgtcccctgaagggagaaatcgaacccatctgtagttgttacacaggcaaaatcacagatgctgctgtggtctagccagggtcggaggggctctgttctgtggtgtatatgtaggtatgtgtgtgcgcgggtctctgcctgtgtgtttctgaagctggtctttaacaagtgtggactctctgttgaattctgcattttctcctgcagccagcaggtggcagtgctgcgacagtcgggtgactccagtcctgtgacgcctggccccgcagcgcttgtcaggactggtccaaccgtggaagggaaggcatgtccacacgcaccccaaggtggcccacatagaggtcctgggcaaggcgatatggaggagagccatccaaaggcccttctgaaacctcctctcctctcttccattcttctctatttcccctaatctaatctagaaagggggaaacctactaacgtttcctaagcacatgcagcatggttttcagacttagcataaaacccctgcagagcttgtgaaaatgcagcttcccaggccctgtccactgagactctcacgcagcatggctgaggtggagcccaggaacgtgcattttgagtaagtgctactggtgattcccatgcagtccccagggaactccaaattgagaaatagaaaactagcatattccaggtgctgtgatgagggcttcatcctagatctgttctcagggttccttgtaaattataattctctccacctgtttcctactctaggtctgttctcagggttccttgtaaattataattctctccacctgtttcctactctagatctgttctcagggttccttgtaatttataattctctccacctgtttcctactctccaaacacattgccgctgcactcctctaccatgaagttttggctctgcattcttaacggacaattttgctgtttccttatgctaatttcctggtgctctgagatcaccggacttcctgctccagaagcaggttttctcacactgcctccctgtcatcctaacctttcttttattccgtgtaagttcctgaaatgcacagtgccttaccctgccttcccagccatggggctttgctggagccgtgcacggcagtaccatgcttccccacctctcctatgctctccacttgcttccttcccagtcaaagggctctgctggagttctgcagggcagtgccatgcttccccacctctcccatgttctccacccctgccttctcagacacctgagttggactgccctggtgaacatctccacagtcaagcaacctggagctgcacctacagacatgtgcagaggacaggcatctcccttgaaagtcagcatgacacaagacctacccacagtggtcatactgggcgcttttaagatggcaacacaaacaaactctgaaaacccagtgtattcatttgccgggggtgccataacaggtgaccacaaactgggtgtcataaaacaacagaaatgtattctgtcacagctctggagattagaagtctggaatcaaggggccggtagggctgaatccttcattgcctcttcccacctccagtgactgctggcagtgcttgctgttccttggcttgtggcagcatcactccaatctctgcctttgtcttcacatggcccgggtctctctgtctaaatttcccattcttttctctcatgaagtcaccagtcactggattaaagcccatccttcatcctaacttgattagatctccaaagaccctatttacaaaaaggtcacatgcacaagtatcagaagttgggacttcagctttccctttggggagatacagttcaacctgcaacaccccacgaaccaaagattctgctttcacttcttacctcctgcctggagagaggagagcagagtctccgtgcttctccaagcactgaatgacctttcccatgaataaagcttttgctcttggtggatgccatattggaagaggttaaagcaagtcagctttgggcttccctgagtgcagtggttctcagagtttgggctcctgaccagcagcatccgggaacttgttagaaatgccaaatctctagccttgcgcagacctacagaatcagaaactccagggctgaagccagcaatctgtatttaataagttctacaggtggtctggatgcatcctaaattttgagaatgactgctcccgcggcagggctcacaagggcatccccagcaagttccagccactgactatgtcgtttgttgccccaaatctccctgtttttctgccctccggttcctggcaatcccttgccagctgcccttccttgacggctgtcagatgcctggcacatcacctggctccacactcaccggccagcttcccagcactgtttttctccggctgcctctcctcacctggctctccgtccgccaccccctcgcgcttacttgcatgccctcacttccctctgactctttctcctgacaaagagaagagcttggcaggggttggttaagttaactctgatcacacagaaaacaaactgttatttttctgtctgccaagctgctgaaggcaaggatgtcaagcccaggatgtgtgtgaatgtaagatctacagttaccctagcgtgtctgtgttctaggcaagctttttttttttttttaaatcgtggtccagttcccagggagataccagtgacaacctcttggatgctcattgcgctggctgtgacagtctctgtacacattccctgacccagggaatgagcaactcccataaacagcagacggtgggtcacctctgacatctgctgtccacatttctgatcccctggaaggccttgttcaaagcaacactgggctgaaatgttggtgcaccatgtgtgtttgccgtgtcggtgcacataagcagacagacctgcaggaggcagacagccaggcaggagggagccccgggggacacgtggacacatgttagagtctggtgaacattcaagacaaggttttaaagatgtgtctgtggttgagggtggggaggggcaaaaaggaggccctttggagagggccaaggtgcatatattggggagcctgtatgcgggtggccaccctcccaggagagtttcaagtttctggggaggagggaagcctgggtggggcggagggggcataggaagtcctaaactccacccccagaagaaggtagaaattagcagagtatctgggcaagctacaacccagtttccgtgccttttttgtcccaatcaccaaattgggcacaattatagtagaatagcagtgagaaaaaaacaaacagtaaaaataaacatggtaagtgaaaaggttggaaaaggaatgtgccagagaaatctggaaatctttgcatgcaggcactcgggtctgagacacactttccattgggtctggaaaccaggtagaccaaggctagagttcaatttccctaaaagggcttttttttttttttttttaacagagtctcactctgtcactcaggctggagtgcaatggtgcaaactcggctcactgcagtctctgctcttgggttcaagcgattcttgtgcctctgcctcccaagtagctgagattacaggcatgtgccaccatgtctggctaattttttgtatttttggtagagacagggtttcaccatgctagccaggctggtcttgaactcctggcctcaagtgatccacccgcctcggcctcccaaagtgctgggattacaggcgtgagccaccgtgcctggccagaagggttgcctttttcatttctgtctcctagatgtcacatcaggttttaagaggctgtggctccattctttatcccacacagcaagaaggtagcatggctaaacatcctggtgcaatttcaacctctcaggaccattctctagtttcaaaccccaaaaagcacctggccacataggtgagttgctccgtcactatcactcatttagttggagacactcatctcctcttaagcacctcccgtgctgtatgtatttttaaactattgtgacttattttgctttggaaatttaggagatcattgggtcactctttgaaacaaccagagatgctcaggaagaaagggatgtcacaaaaccaggtttggataccactgttctggggttcggcttcctgtgacttaagagatctgttcagattttaaacaggacagctgatccactatctcactgggtcccctctaggcaatataagccagagaggccttaacatcagaaatacaagggttggggaggggtggtgcacatttgtatcagtgtattctcctttagcacagatgaaatacactgggtgacataatggaaattcacagagggaaaagatccgttgggggagagactcataactcaggtgaccactgaactgtgatccccacgagttcaccttgtccagcctgtcttcccttttgccctctccccaccaccaggccttaaatcacctgtacatgtgcattgctgggtgccagcagatgattcatgaaactcaacagacagatgccctggtgggcacaggaaaccgaaggattgagagacatgggtgtgttgaagtgctagcagtaacagccatgaggctacacagtccattaggttttcattttacaaagtagagtgtacttgcatcatctcatctaatccttcgagtgatctgaggagttaggcattattacctccaaagcctaagagaaagtggtaaaagcaaagccttcaacaacaaaaccccaacccaggaggcctgacctgggtccacctaaaatctctcaggacaattctaggcactctccctccaaaataggtctgctagatcttcctcctgctccacggctctgctgtgcaaggtgtcaccatgccagggagtcttctgacacgactctcccaggccatgggtgaatgttccacttccaggccactataatgtcgactgtccttagactatagccatgcttctgggttctgcaaaacaatctgaacccaagattgagaaacctgtgatataatatacagatctgtcatgtggaggagacttgcaggtttgatttttctcactgtttaaatatctgggtggctgcaggaaagatacaccaccctctgtgcctcagcttcctcgtctggaagtgagggcctcatatctctgtggtttctccaagcagaaatgatgcaattctacatgaggtgcaaactaatttggctacaaatcatcacaaaataggcctaaggatggagatggtcctggaccataccgagctaggcagggatcatcagagacaggcgaacaatgggtaaggagggccctggagcaatttatcctatttacaaaaattaggctctatctaaaaacttagcagagaactgcagacaaggatgttgaccagtgaacccaaaaccggatgccaagatccttccaagaaagtgaagggaatgaatgagaagggaagaggaagagaaagcagacaggagtgaagggagaatgggagaggaaaaaagagaaaaatttaaaagatctgccggtttgacactcacatgaaaatgtcccagcagatttgcatttcctagtaataaatattttgtgtttacttattgtgacagagtttgcatgtcatgtaatcactgtttcagttcattttccccccaatgatagattgtgataagttggttgttaataatgctacaatttacctaacaaattttgagcttgtaatacagcttcattaatatgtttaatttatcgttacagttccttcaggttaatggtttgagagtatgttggagtttaatctgaatggctattataaagtgcttgtttctcgttaaaatgtaaaactgagatacccaagatttatttgggataaaccagccagaataaatctccctcttctttgcattgggaagggaatgagggtcggctattaaaaaggctaagcattggagagccccttcaggtaagtttaaagtaattttgcagattaaacatcctttccctagggtgaatgggagcgatgcctgaggccagagtttagcctagaaggattctctggatgctgcagaaaggtagggacatcagaaatggggtgataactgaatttcgacaaaatacagtataagcattgcaggtgactggaaaggtatctgagtgttgggtgatgggttatagaaagcagaatccacaaagattaaaatcaagaacacaagccccctgaaaagcacaaaacagaggagagcagcctcctcttctccagatggaattttggcagcatcctctggctgacaaactttcacaacactcctgtaacgcatcagacacctgcccccacctgccttcacctccgggctcctcatactggtttattcttctgggtaacttttagcttagttcagaaaaagaaagaaaccctcattctgtggctcaaattttaccacccaactgttcaagtggcttctagggtgcctaacagtttctctggacctggggtgtgaacgaggttgcctcagagcattgaagaagcttctggatacggggccatctacatttagtgagtttgttgatagctgaaaagcaagagtagaattcttgccatttgaataatcagggcccctctggacaagtctctagcacccaagggcatctcagaaaaacagttgttatgggttgaactgtgtcccctgaatagatatgctgagatcctaagccccagtacctgtgaatgtgactttacttggaaatagaatatttgcagaaataatcaagataagaggaattgattagggtggagtctacaccatattactggtgtccttaaaagaagaggaaaatgccatgtggccgatggaggcagacactggagcaatgaagctgccaggcaaggatggctggccactaccagcacaaaggagaggcaaggaagggttctacacagagcctcaaggagtgtggccctgctgacaccttaatttcagacttctagcctccaggactgtgagagaataaactcctaatgccccaggccacccagtttacagtgttttattacagcagccctaggaaactgacacacgtaagcccagtgggtcactcttggcactacagggagacgtgtaaaggcaagggtgggcatggatcttacagcaggcagcggattccaacacagctgaaagccaggacacagtagcccttcctacccactgtccagaccttgtatgatccttaatcctacgtgtcaacctgactgggctgcagggtgcccagacagctggctaaactttattctgagtgcacctgtgaaggtctttcagatgaaatgcatgtttgagtggttggagtagtgcatcagactgccttcccagtgagggggggtctctaccaatctactgagggcccgaatagaacaaaaaggtggaggaagggagaattccctgtctctgcctgcctgtcttccagtagggacattggtcttcttctgcctttgaacttggactcaggctggaactcacaccattgacctccctggctcctcaccttgccaactccagatgagggaacttcccagcctccatagtcctatgagacaattctttacaacaaacctctttatgtatgtaaataaatgaacacacacatacacaccatcctactgttcctgggttttggtagaatccatgtggaatcagatgctctgatgccctcgaatggtggcccttggtgctcccgtggcctgcatggtctggccccctctctgtcctactcttgcccctgctcatttcccgtccttccccttgccttcccactgtgcctcctctgccagcccctgcatcagggctgctctgcccgcttggatgctctctcggagaacctcacaaggctggccctcgcttcccgcggccttgcacccccatggcatcttggagaggcttccctgactccgagtgctgatggttcccattcctctaacacatctctgtgccctcacccagtgttatctttttttatataacacaacctgaagttatagctgtttatttagtgtgtgtttcccccatagaaactagaaactccctaaaggcaggaatcatgtctgtttcactccccacagtgtctgtgcccagtgcctggctcagagctggtactcagtaagtgttgtggcaggaagggaatggggaaaggaagagggagggagggagggaagaaagggagagagggaagaaggaaaggagaaacagtgagaaaggaaggaagcgaaggagggagggaaggaagaaaaagagggaagagaggaaggaagaaaagagggagggagagaagaaaggagggagggagagaagaaaggagggagggtaggaagaaaggagggagaaagaaatgtggaaggaaaaggagagagtgagagatgggaaaggaaagagggagaaaaggaaggcaaaaaaaaaagaaaaaagaaagggagggagggaaggtgggcagctttgcaaccccaggctctaagtgcaccattcaaagatggtcccttgggtctgctcatgcctggagcatcccataatttgacatttccaggggtaggttgcaatctaagggtcagaagtactgagaaataagttagtcatgaaaattaagattaaatatatagattttttaagataaacttttacttgaaggttcagggaaggtcataattgcttattataaaatcatataacatatggagtctcccattctcacccctacccacaaaccttctgaagtggcaggttcttccagaataagatccatatataacttgtctgcctggaaagctaggtcctctctgactgaatttcatttgtcacccttataacaccaaggtcggacacccatgcaaaatatgcatcaaggttctgctatgccctgggttctcggacacagaggtgaacactgtgtgaggaaggtcacatctggatcccgcatgatttattcatcaaagtataccaaattgaaatcctctcataaaattattcatatgtgagttaacaaatctctaaaacagagcagagcacacggtccattgtgccctgtgtatgaagaagggacacaaagccagtctcagcagcagagagattttcagcaagtcctccctccaccagcctcctcccccatcactggatgaggagaaggttccagtccttcccactggtccctgagaacagggagagccgccctgtgtggggacacaggtgagctcctctgcatatctagaaggaaaccagcggcagggtgcaaagagaacttccagtccccatggaaagggtggccggatggacagagcgctgcctttgaactctcttcctcgttccgctctggcagcccattttcctttaggcgtctgaccctgctaatggggactgagtttccacgttaagtgaaggggtcactgggtcgggcgggcgctggcttctcttcctcctgacagatccataattagaaggagacagagcattcaaagaggagtgttggctccaggcacatcctcgtcagcctgtcaagcagaagcctgttctccatgagctattttgagccaccttctcagctgcatttctgatcttctcggcctgtgtcaccctcccccaccccatggtcttcctcccaccatgtctctgctgtgacatcactgaggcacatgggcttggcggagggctggacaaaaagggcattctgtgcaagatgcctggggctaataggagcgggggggcctcctgcccctgccccacacctccaccacctctgttccagtggaatcagatgtaagaatcagagggcctgggctgttgactctgggagcaattatgaccagggccatgaggttcaacagattcctcgccttggagaaataaagggtaatcactccttagagaggacgtcatggtggcgaaactggaatgcagagcaggagagcatgggcttggtctctgcccaggagctgccctgtaggatttccaggcccgggcaaaccaggtgggatcataaggacctatgcacactccaggagtccccagtgctctactgatcactccctctgcaccgcaggtgctctacaagcatgatttcctgtcctgctcatggcaactctgagagggagagaccattgcatatgaggagggggtgtcttctcaagactcagccaccaaggatgtcccatctggcctcaggttcacaaggtctgggttcctggggaagctgggtttgcttgatctgaggctgtggttctcaaagcgtggttctggcacatcgacatcactttttcaaaatccagattctcggactccctccagacctactggatcagaccctctaagggtggagctcaaccgtctgtgcttcaaggagcactgcaggtgatgtggatgcacccctaagtttgggaactgctgcccaaaggacacctttttgtcggcccataacataaatctctaggacaagtccaaatgcccccactccatgccttcctgtaggtggaatctgtctcttgaatccagctccagccttacccttttagcactcaccccaggctgttctggggtctccccatcatttttgggaatgctcgccctctccctgtctctggttcttggaatgaatttttatatctttatgtgtgtgtttccctcattttacaagaagagagtgagtgcctcctgtttgtgccccccaggactctgcccaagggtgctcagccctgtgcctgccagggccccaggggtccagtggttgtcacacactgcctgtgcagaaaccagggagaattgattaagcaccagccttaattgtggctgcactgcctgagagctggcagccaattccagctgcttttcctcatctgcatcatgggcctccagctcctttggatttttttaaattatcaaaataataactcacaagtcctttgcaccagccattctgaagggatagaagaacaaagaggaaacaaacgggttgactccttgtctctgggggccctcaggaaatctggtgatactgatgattcgtggggccccaaaaagaaatgaaggctcccaggttcttgtcctgctgccactgaatctttatctggtgacctaggcctggtcattctgagtcccatgatgaagatcttctggttacataatagggaggattctacattaggcaacaggtattttttgagcttagagaagccaggtgctgtcctgagcaccacgtaccctgtctaagagaccttaactctttagaagcgtgctctccgttgtgtgttgagagctggctgaaatccagaaagtgccacggacatgcaggaggcaaggggaggagcacagggcagatttccctgggctgatttttagggaatgagtgggcattgtgaagacggaagagagagggaacagactagtataaggcacagccagtgcagagccaccgaggtgggaaggacctggattgtttgggggcagtgaggtgctcaatttggctggagctgagtagggacatggtgggaagaaggtgaagctggagggagagtccctcgcagtgctggccaccttacatcaggagacctctgggacaccagcagtgacctaatcaattgctcacagtggcagagtaaccatcagaatcaggatttcaagcctttccagtaatcactgagtaaaatataacccgctcaccagtgagtgatccagaagggacagaaacagagaaagggcggaaaaggtcctcaagccttaaaaataaaacttgtcttctgtcctgtaggagtcctgagtacttctttaccgcacactttaaaatgtgaaaatgtaaagaagttggctaagccagggcattgcactggggatcctgcccaggccccaactgtgtctgcatctggctgtaggaggggagtggcccaaatgggaactcttagggaaatgacatggctggtcaatggctgagtgtcccagctgtgctatgggtctgatcttgaatctactggaatcacaaggatggacatgtccaaggtcacagacagcaccactgaccctggcagccacctggtgaatgtgaccctgtgcaccatgtatccctacttatcacaaaagcaacatctgtcataaggggttacaggtgctgcttacaaacataataaatatgtttttctaaataaagaaggctgaccaagggcaggaacaaagcaaagttactccttttactataacctccctggtcacctttgacttccaagcctgccagtcatttttcaaggttcaaggctccattcgtgtcaagacagagtagagagtgagggtgggatgggacagtggggaggggccgctcaaccctggcagtagcaacaactccttggccatgttaatgagcagctttgttctgcatcacctagctgtataataacagcaggaattaatacaaccacaaattaatagcacagaagagcaatcaggaggcagagatacattcctaatgggctcagctgagagcaggaggaagatggatatgggagcatctccctgccttggcccctgaaccttgccagctggggctggcagaggggctgaaacaccgctgcacacagcctcacctttgccaaggacagagggtttggctctgccaagggtaatcagggcctgcagcctgtgctgcaacctccacctgctcttcccagtcagagccactggcccaggaaggagcaagacacacagctctgctgctcagggacctggggcatcaggtctgagtcttgcccatgtcactccccagggaaggtgacagcatctctctcaattgctttcctccagatcctgtggttatagggagtggtcaggagcaattttctattaggtccaagtgaacagctcactcagccattgcatgtaataataacctcaaagtgcacagtatttttcttataataattataatggtggctattgctctcgggctttccttccaggccacctctccaggggtcccaaagcaccagccctctgtctcacctgtcccaagcactatggttgaaagaggtgataggcagaaccagtgtgccctgtgaggtacagggcgggttctataggatggggattcttggtcccatcctccccatcctacagccactgctgtggctagagacattaatgcatctgtgagaaagtggaaggggcccttgagtgttgagatctgggtcctagaccctgctcagataaggcatctggacaaccttggacaaggcactgaactttcatggacaatgtgtatatcatctatgtaaaatgcaagctctgaatacacgacttctaaactcccttcaaacactcacatttcattaacaataaagtcattgttcactaagagaacattctgaagccatctggaattctgcctctttcctctgccttcttgtacctgtgaagggagtggaaggaacccatggtgcccacgtcgagtgtggaaagaagcctgagatgtttaggccacggaatggacatcatttcagttgaaactttgggcaatgcactaccagggtcacagccttttcctatagtgtttctgggacctgtccgctctgaaatcagtgtgcttcttctcccccactgtccttttgtgactactggtcttcatggctatgtttggaagcaagaacatctctatcaggtcttgtttaacttgagccttgtcccggctggctgagatggtgcgagctagggaagccagtgggaagggcgggaatcatctatgggaagttggccaaaatcttactaaggaactgggattcctaaatccctcactgggagaatttattccagtattattccatgggctgggcgtggtggctcatgcctataatctcagcattttgggaggccaaggcgggaggactgcttgaggccagcagttcaagaccagcctgggcaacatagtgagaccccatttctaaaaaaaaaaaaatacaaaactaaacttagctgggtgtggtgggcgagggcctgtagtcccagctactcaggaggctgcagtagaaggatcatttgagcccaggagttggaggctgcagtgagctgtgatcatgccactgtactccaacatgggtgacagagtaagcccctgtctcaaaaaaagaaaaaaaaaaaaaaggacaggacatccatgtttatagacaacagaagtaaaagttccacttatctatgacatgaattctgatattttcccttctttctcactctctctcttactctttcttgctctctctcactcactcactctaaaataaaatgctgtttacaacccactaaactgctttcatgacacattaatgggtctcaccctgcaatttaaaagtcactgggtgagatgcactccaaaggacattcctggtttctgatgctgtggtcggaaactaggatagcagctctctgactccctgactcctccccatcaacttgttgccctgcagcggccatccctgtgtgtggctagtggggaatttgtgggaaggggtctccacaactggggcttgttgagggactcccacccaatgacaatttggcacaggtatgcagagtaataatgggctctcccagctcccctccatgctgcacctactcccagctctgagctggagctcccgtgcatcttcagccaggaagaggaagagggaggtggggaggtgggaaggtagcaacaagcaccaggcaaccatgagtaatctaggccagtgccagtgccaggggaggtgtgatgggaggcacctgggcctcctcccctgactcctgctgctgctgacagccccactgggagctgcaatggtgctcttaattgtgcctgctcctcagctgctggagggacacggccactgtggggtgcaatccaggaggtgtctgggtttggaggggtgcttctaccagagggcagggctgccaaaagatgagaggcaaggcttggggcaccccaagagacagtcctgagaaagagacatcattccccttcagtgaggaaaatcagctccgggccccacttcccaagggtcctgtggggataagacacttccaaagctttgtcataggccttgtcttataaacactgccagcaacgcttttgagcgggagggactcattccaaccaccagccctgctgattttttctctctcttctttctacacaggaaaacttaccttcctctccggggtcctggaagacctacttctccatgtttataaggtcctttgaacaaagcagcattttgtacacatatttagctgctgttgttatgcttattaaatgtgtttaataattgtgatgattttataacatctgtaacttctttgttttacattatatgtaatctccttaatggaactctgtagcccagtgtaaaacacggaagctgtagggagggggaaatagtcatatttttgcacagagaagtctcatgattatattcaaacagaggtgtctcctggtgctttataagatttcagatttcttttcttttctttctttctttctttttttttttttttttttttttgagatagggtctcactttgtttcctaggctggagtgcagtggcccagtcgcagctcactgcagcctcaacctcccaggctcagatgatcctcctgccatagcctcccaagtagctgggaccacaggcatgcaccaccacacccagctaatttttttattttttgtagagacggtgtctcactatgttgcccaggctggtctcaaactcctggccccaagagaccttccctcctcatcctcccaaagtgctggaattacaggtgcccagcttacaggtgcccagctgagacatttttcttactctagagagagacactgcagattctgtggtgattgcaaacaatgaggaagtcacaattcagggcctgcaaatgatatctgggccagaatcaggacggaacttcatgggttaaacaacaagggggaatggcggcccctaaagcccttctcccattcatgtggataatagttgtactagacatgaaacgctcttccttatatttctaccaacctgccctcaggcaccacaccacctagtgcccagaacatcggcattgaatggcgccataacaaaagactctccccagggtctaatcataagatgatcaaacactttcattcaaaatgcaggactgtaagttgcttttgctgttctttcaattacccagaatgtcagcatatctacattgacaggttaatatttggatgatgactctaagctctgtgaaaatcctgactgctttcaaataattttttaaaaatttatatttggcataactgtattgtgaagtcaaacttgatactccttaatcttttgactatttatcacccttgtacaaaatatattgtttgtgtttcaccaaaatctattgtttagtgactcccaagactttattctctaagcacagtcttcatagctgagcagttttgtacagcaaccttcacagggctcgtgagccatatcagaaattaggattctagggaggatgaacaatatgaacattttgattctggagggaggacactaaataaacagcatctcttttctgtaataaggggcatgatttaatgactgctaaaatctattctataatgctatgactcagaagcctctgttctctgccagaggttgtttgttcccaagtcctacctcctcttcccactgccccaaatcactagagttcattctccttcaatgagttagccttgtttgctaattttcaagtattttcattctggggctccctgggccaaaatagaacacccccacccccggcaccggcctttttagctttaaagctcaaggtcatcctatattaaattgatgcgttctgacattatccatgaaatgacgagtttctactcaggaaacaaagacatcattgtttgttcttattcaaaccatcaacgaatatgagttcatggcatctccatgctcctagagctcttcgaagacaggaaaaggcaaggagacttccagaaaacacattaccaaagatgagagactggctcaatgaagaactaaagctaacccatgcacctggatctgcaggtctgtcctctgtgttgccaccttgtctcaagacctttttcccattctaggagggaagtgggggcctgctggtggtctcccccaaccagcatgtgccatttggcaagaccaccagagttgctgggctactgtctgctgagaatgaaggaaccatcagtagagagatgaacagcctcccagtctgggaaagaagttgccagaacttagaggaatgatagcagagctgacatattctctgtcatctgcttgccctaccatggatggcaagattcaaggccccagctgagaagaataacaaggaaagccatgttcttatggaaatagcttctgctctctaagtattctagtccacaccaactctgtttctggagttaagatttaattagcttcattagtagtataaataagaatgttaatggctctgcttcattcacagtgactgatggcttaactcccattgagctaatgggttttagtcacatcccgaatcaaggtgctgagcatctgatccaggcaacacacatctttgtcctggtttttccagagtagtctttccaaagttttcacattgtatatcctgatatgggggttcagaaattatgggtactattatgtgcatccataacctcttcctacttggtacttagcctgatctcaaaaccccacctgctttgcctttctctctcctctagagatattccagaacagaagagttttcctaggcaacaaaagagatggggaaggagcacttattgagcatctactatgtgctaggtgcttggttccagaacctcagagggtggccaccaccaccccccactctatacacaaagaagctaaggtcagagacaagggagcgaatcactagcaaagctgggatttgaacacagaacattcaggctgcaaagctctcttcaccaaaacatcttgcttttcagcaaaaacacttgagcaactggttgctttctcattgttctgtgaatgttcctctgatgcccttgaccaaaatacacactccatgagggtagcagccaagcctctgctgactaattaactcctatagttaaaagccaattcaaacagccactctgcttctgcgtggactttgtttcctaccacttctagcttcctgctctgttcactcccatcacacccaggaaatctggaacttggagccaacaaaagctgcctctctcaatccactttgctgttgtaataacaaaccataaaattaactaaatttcaccgcggtgtaatgtgctgcataaaagcggtggcaatgtgtccgcagggcaaaggaacattccactgaaatcagtttctctttattgcattgccaacattcaataatttctcccccataaaggcagggagaatggcatgagccaaaatagaatggacacttgcaaacgtgctgtagatacctgtgcatgtgtgcagctatgtgcaaataaaaactggcaagtcacatgcacatgcatgttcatacacacttcccatgtccacacatgtcccctggctgtggaagcacatcaaattgtgcacatgaatactcagatgcatgcacagaaatacatggctaaaacagcgcacatatacctgtgttgtgcacattcatacttgttcaacacaggtgtgcaaatgggaagtcatatggagaaggttgtgctttattgtctttcgtataaatgccaccagtaaagccctcctggaattccgcagtcaactacaccctagttgcagcacattaagcccatttctaagaaacaacgtttacaaactagatgttaaatgctggaacattctcttcctattgctgagaaaagacagccaaggtagcttcagtagttttggcaggcttggctttgtccaaaatgacacaaccagaccatgttcaaaaaaagagcagggcataatgagcttaagggagtatgaggctctccttgtaacatatttccaggctgggtaaaatgtgccttgctcactcaagggtcttttcttgaacttttggagaaaacagaaagccactcccagtagctgggtgagtcacagactaatgggatttgcctttgcccagcccagttatggaagaacaaggaagttctgctgactgtctgctctaagtttttcctggggcaaatttaggttcatcttctcttgtggtggggaaggcagttgctgtcacactctcatatctacactgtagagcgctgttatatactcactctcaacttgggcaaggtcctctctgaaattcactatgactttcatcctctatgaaactcatattctcagatgcatactgtgctgagggtatgctcttaaaatttccaatttctgaaaggaccgcaggatggaaggctattttgtgtcttgtaaaaagcactggatcaggaatcaggagaactgggtccacactagttctgccaccggcacaggagccgtgaacagactcaaattcctctcggcctctaaatgcgtagatgaaactttagtgtgtcagtgagctcccccaaacttatgactccaaaatgttttaaaatccactgatgaaaggcaaatgccaatcttgcttttatgaaaaacagcacacaaaaaagaatacctctgacgttgtcaaagccagccaactattaagtctagatgtaatatgatgtcagtaaaaatgagttgttccacactttcaggacaaattgtctcaaaaatgctgccagtgcagtaattactcagatatttacacagtgattaacattttcacccttcaaatcatatgaggatgttctatagacagccagatatcttctaatctagcctggaatgtcttgtagaagagtcacaatgctcaacattcaataaataattacttagtgaccacattataaatatcaggaggtggatggtggtctgtggggatgcagcactgaataaaagacaggacctgccctcaaataataactgtgggaactgacaaccccaaccacccacttccctcgtcaggtacccatcctctggacaggaaaatggttcttgtcttctccaggaagacaaatttctgggctgcagcagtatcctaaagttatggaggaagtatggctcaactcactgctggcgagatgacacagaccacctagcactgttttccatgacaattcctttcaggaaactgtgatgactgaagaggaggaatggaagcccatggacccatccaagatgagatgcagcttcttccagaatggcaaggagtctgagaaagagaaggtccccacaaggtctcttctggctcaagtgattattccgctagtaaattacagggtaaatggcattcttgccatttcacagaccacacaaactgagactccgcaaaacataatgattaacatctgcaatcacagaacctttgagccaggctaaatgttagagatttttctacctacctctcattttgtaagtaacaacacctatgccagagatgtgacttggcctatactgcctcatcccccatctaatgtttcttaccacaccaggccagtaaagactacatgaaagtttatctctggaaataaatcttgcaacttaaatttaacaccagttctcagtcacatattctacagagcagttttccaaattttatcacatgaaaagatttgttttaataaaatcattgaactagagattccttccatttctccttgccaagatatttactgtgtacctaccatatgcaaggcatcaataaaaaagggaaaagagtgttccattttgtgaaaagtagcaattatgaatgcattttctcctatgtaaatacatgaataaaccttaatataacctctctccccctgttctctccttgccccaccctggatacaataattgtaaatgtttaggcctgaattttccatctttttaggttaggatggaatattcaggggcccccacacttagtttaggtgccgagtgacctagcatgcctgtattcaggacttattatgattagattatagaatatttgattttaactggaagtttctttataaaaaggcctctaagggttcttatgtaaaaggacctagcacagaagctgaacctaataatgaagatatttttaaccaaagacactgtaatctacacacacagcatataaaacaatatagatccagactgaaaatactcactcagcatccctgcctagctagccatagcagggaaatgggtatattgtagaattatgggcccaacagatctcattattttttacattctctaggtctcattcacaatctttgcttttgaccagtccctgagggagtctgtggcagttgagacagagactcagtggat[450 bp omitted]aaagagcacaagagaattgggaaattggaaacaataaagaacctctctctgcagcattatccatcctgcaagtccagttttctgcctaggttgtttctcatgcccaggctagagtgcagtgatgtgatctcagctcactgcaacctctgcctcctaggttcaagagattcttgtgcctcagtctcctgagtagctgggattacagacatgtgccaccacgcctggctaatttttgtatttttattagagacggggtttcaccatgttggccaggctggtcttgaactcaacatcctcaggtgatctgcctgcctcagcctcccaaagtgctatgattacaggcatgagtcaccacacttggcctcttcctaggttcttaactcatcctgcagaacccatagcagctatgcacagacagaaccagtcttggaggaagctgtagaacatttcgaggggcatgaggtttagaactgacccctatccaggccctacccctgaatgactgctaagagttggggagactcataacctccatcagaactgaattctatctgaggataattgggcatttacttactaacactgaacaagttactagaatggcacagaaacaatagcaacatgaagggttttctccaacccttgggttttgcagcctttaacacaccatattttatctaatctaaggcaccaattgtacagcacactataattttatgtactactaagaaagaaaaaaaggccggcaattaactatgacaatacattgattgtaagaagcattcaatttcagagatgttagattgtgagggaaaaatgtgtcttagaattgctaatatatagtaaaatctcaatcccttacaatggcattaaagcccttcccagaatggccccaaccaatgtttccagccccatatcctgccttcctgcatggaccagagcttcagcctgattctccttggtcagcacactcacaccttctaattctgggcctgggctgatgtggtctctcttgcctgggaggtagctatttggccccagcccccctagcctgcctgggctggtcctcacattccatttcttcctcatcatggcccttaccctgtccctttacagcacagttctgagtattttagggttgagttctttctctagattataaattccctgaggaagataaaacaatagttaacatgtgttgagtatttactgaatgacagttacataagtgtaaaccacatagatttcatatgcaagagggtgctattatctaatgagaaaaataagatatagacagcaactttaccaaattcatacaggctagtgacttagtcaaaatgggattccaacatgcttttgggtgacaccactgccccatttttaaccatttaaaatgatcttaatggtctaagcactggcatcaagggaggcagggggtgacattaaccaagcaatccatcatggattttcctctggcatcaatctggcttcaaggagaccacctaagccagctctgtctcttactattcttccttcccacaacatcagaaaaagcatttcctgctgttagggaatttatgattataaataaaaataaagcctgtaagacattactaaaaagtaaagaaaaaggcaactagataaaaaaaataaagttggataaaggtatgaataacaatgctgataataacaagagaattcactaaccatagtaatatgcttagtccaataaaggttctgtgaatataatgagttacaaacagattcatcttggctataaaataagaagcttctgtgattgttattgttgttattataaattaagctgggcttaaaatatcacgctgtagacaagggtgtgttttaataaacctgaaagcacaaccccaagcaagaattctgcctcttgtttctctatctcaaagatgtttctaggcacaggtgagaggccagcaatcctctgaccactgcaagctggcttaaggagaagggagctgactaagactccctgggccactatatgttttccctcagaagatatttacacgaggccaggcatggtggctcacgcctataatcccagcacttagggaggctgaggtgggtagatcacctgaggtcaggagttcgagaccaacctggccaacatggcgaaatcccatctctactaaaactacaaaaattagccaggcatggtgctgggcacctgtaatcccagctactcaggtggctgaggagggagaatcgtttgaatccgggaggtggaggttgcagtgagccaagattgcaccactgtactccagtctgggcaacagagtgagactctgcctcaaaaaaaaaaaaaaagaaaaaaaaaattaaaaaagaagatatttacacaagggatgggggatactggcatctggcagaagtccctttccaagatcaaaccctaggaaaaagtaagaagtgtctaaagttctagtactgaagatcaattcaacagttaagattttttttttttaaggttaggaaaacccactacaaaaggaagaaggaagctactttgaaataatacaaattagactgggtgagatccttccatggaaaatcttcttttaacaattttaaattgcagtaaaatattcctaacataaaattgaccatcttaatcatttttaaatgtgtggccgagcagtgttaagaacattcacattgttgtgcaaccatcaccaccatccattcatccatggaactcatttcatcttgcaaaactgaaactctacactcattaaataactgctcccctttcccctcccacaaggtcctggcaatcaccattctagtttctgtctggaaagtctttttccaatggagcatttcataatcagtgttgcactgttctttcaggaggccttctgaaatttgtgtcctttgaaaagagaagaaccatccttccagagccccctggcttaaagtcacaagtgggaaactgaggctcagaagagagtaagatttggcttcccttagaacactcaatgtggctgggcacagtgcctcacgcctgtaaatccagcactttgagaggccaaggcgggcagatcacttgaggtcaggagtttgagaccagcctggccaacatggtgaaatcccatctctacagaatacaaaacttagctgggcatggtggtgcacacctataatcccagctacttgggaggctgaggcatgagaattgcttgaacccggaaggtggaggtttcagtgagctgagatcatgttacttcactccagcctaggtgacagagtgaggctgtctcaaaaaaaataagtaaataattaagtgcacaagcaggtactacctctctgagagcaaacacttagtttagagcaaacacttagtttagacacatcattgccaccccacactcaccacgcctgcccataatgcccctagtacccaatggccaacttgaattactgtgtcttatcaggatgacaccagtgcagttgtttcctgcatgtagaacaggttaaatgccttctggaaagcaccagtcctttcattaatgagctcaccttgactgtccacagcacagaaggggtgccatgacagccctatgtcaagacatggattttttttttctttcccttagcccttggggtggcagtcgcctgccactgtgtgcaacctcaatgtgccccacagatattatcattttctacatgtgctacgatatgattaaggactactgaaatttggattttcttttttcacaagacaaaaaaacagaaaaactttgagctccccagaggcaagggagggaccagtgcaatggagggctaccttagggtctttacccctgcagagcaggtgtggggtctcgtggagcaactgcatgtgccttgcctacttcctgcacccagaaatagtcactaccagcccctgtccaatgagggccagcatccacatccctcccctttccctctggcagtcctcctttaaacctcctggaggtttagcttcctccttcctcttctcttctttaagttgttccattatctacatgcagggtttgatgcagatttccaatagctgttaatcaaaacatcttctatttctacctttgtcctcgaagtgttgtcatgtcacttctgtactacaatttaattaagtgtcaagcaagagatcagttgagaaggtcttgcctctcagtggaactagggaataataacatctgcaaggcttgcaggcatcctgtgtctaaacccaaagcaacacatatcatagcaggaaggacctttccccaccccagtaagaggaatgagggttgctgtggactagcagtgcccttgagagcatcttagctcagttttctcaccagaaagtggtaaataatacatattttccccaacagcctaggtgccagcattggtagatgtcggtgaaatgaatgaatgcatacatacattttagatcatagatctttagttctttgggggatggatgtaggtgtgaaagtaggaaatccattgataagcagagtgttaaataataaaatacaggcaaaaattctagactcttaacacattacggctggttactttggcaaacattagaaccgccaaagcacacacaactgcacaaagttggttggcaaacttttctgttaaatcgacactccaaagatcgtcattaatctcagtaagttattaactccaagaaatcatctgaacaatggtgaactataataatctgtacataccatatgtgcattaagcattaacacttcattcttgcctatttcctaatgtcaagaaagctcaaatgtacccagcacattgatctctcctgcagaaaaacatgttacatctcatccacaattacaacaactacctagcttgctatgttattgtcatcccaactactgggaaaggaaatgttataatccatggttctaacacacatgaggtcaggtcattcggttgctctgggaactctatagagttgtgctccctaaatcttctgggctgtgccagccaacactagttgggaactcccctccaataaccagactacattatgctcctggcagggccccaggggctccagtgtctcaccccaagagtaactcttctggcactggcagaacagtcccagcctcacgaaagagcccagctggaccataaattgtacagacaaagataaagacacacattttctcttggctcaaaggaccgcagcatggcacattacccacccctctcccaggccagcacagccgttcacatgactcccccttctcctctactgtttctcctctcccactctatcctgttctcctctttccccatctgctgcgtgagctacaaggctcctatcagccctggtcaccagagcagcatatcatcccagagctggtacagcaggctgtttgttgggatgaacttcaaatgaccttctctctgggtctttctcagcactgacttaaccttgttcccgcagacagctgtgggctaaagacaagtataccctggtccagataccactgcttgctatctgtgtgactttgggcacttgtttgatgtctccgagcctcataaaataatgctaacttcatgggatggttgcaaggactaaatgagatatgtcatagctttaatgaaacttagcatgccttacgagtacaaaggctcttcacatctttggtccactatcaggaaggcagttagatgttttaactcagtgttttaacaaaacaaaataaaaacaaagttcaaaaatattaagtgacctactcaagtcagtaatggaggaagcaaaaataaaacccaggtttagcaggttccttatccactgctaattacactcttctctctataaagcaaatgctatggcagaatttttgtgctagccctgccttccaaacatgctggaaaggccacagagcagcaggaaacctacattgttttccctactagatttaaacctgtttaatttgttggattccacaaaagaacacaccatccttcatttatactttatacttcagttttccccatctgcccactgtagcaggaggaggtcttctcctagtgaaaatggttagaattatgtaaggtacaatgtaaactcttttgagatacttagagatgagttctggagaatttacacatacacacacactttactagacatttggatgagtccaggctcctagagaaagtatatttgcagaagttcaggtagatattattgatgagctgtctattcagagccttgaatgaaaaggtgaggtatttttgatgttgatatcaataggcagtgagatttgatcagtagtgagaggatgacattaaatgaagggtcagagaaataaagaaaactgcatccctttgctaagcttggcaaagatgataaaatataaataacatggatgttcctctgattccattttttttcttctttctctgattgccacttgagataattagctaatacaataaggcaaatagaaaaactgcctggatttttgctagcccatttccctctccccagtggaataacttggattaaatagcatcaaagcactctcagctgaatcccttccccccaaaaaaggagacacagagggcaaagccagacctttcttccttttctagcccagaaaggttgctgggaagagctcaagggcccatatgaggcgggaagcagcaatgcgtctccatgacaaccacccaggccaaggccactttcatcacctgaaaactaagcaagacacgaaaggagggtgcatctgtaggaagtttggattcccacaagggcgagcctgttcaaaagccggcatgtgttgcagctgatgtgggatgggtaaaagggaacaaaaggatcgggaaccaaccaagaaactgaccaaatcaacgccagctcaatgaagaggtattggagaatagtattggctgcccaaaaagccgtccaaaatcgtttggtaggaaatggcagctgggtcacaaaaggagaggcagtctgagggtctagtgttgagtaggtcacagagggggacaagcagttgtgtgctccgagaagagtctgcaagccaccttggaggtctggggagggaaggcaggtgcccatgatcacggagatagtggtagagcccagatctacgcctatgctttctaactcagtccagggctatctttatatcttccactggcttcactttctccttctccccttttatacagtgtttcctgcagcagttgctctttcgggcactttcatgctaccagcgtgttcattgtaaccagattttccctgcagagaggcatgggcactatggtttgagcacctttccagggatggctctcctgggacagctgtgggagaaaggatgaaaggaaaggaggaaaacattccatttgcctcccagttgctccttaggctggtgctggagaagtgataaatggggcaggaggtgtcagatatcaacctggccttccttctccctacccgcccattactcaattggaaagattagggtaatgaatgaagctgaactgcctgggttaaacctctggcccttctgctcactcactgaataaccttgcccaaatcccttaacttctttgcctcctaatcttctatacagagatcataacaatcttttccaatcttctatacagagatcataacaatacctacctcctagggtttgccttagaaagaggaacccacagacctaagacctaagatgtcactagcatttctcctgtatgcttgagggaagtccagcccaaggacacaaccgacaaatccaacagtttgtgagtgaatgcatgaaggaaggttagtccgtcctcactccaaacctgttctcttcagacccagtgtttcctaacctttccacatcatgacacagaaagatcaccgtatttgtacaacaggctgaggtcaatggagaggttgttcccagctgcaagcacatggccctgaggctctggctgccccacatccctcctagcatctcccagggctgtagggatcaatatttaggttcctggtaatcaataggaagcaaagtaagcatagcccgaaattagggtgggggcaaccccagtccctggggccaggggacatctggacactaattggtttagaagtatttgggctaaaccctggagtgcagagaatcactctggttagctcaggccaatgggagcccacctcaggtcctaggggtagaggcaattcttattatgcttcctgttactatgctatgggagaaaggtggaaaaaattttttttgaggaaactaccaccatccccactgcacactgaatggacagaggcagaactcctaatgggggcagcgtcccaagtctgaggcgcccctccgtgttcccctttatacgcctccccaccatgtgtacttctgtttgctcctctgtaagacactggtagccatccaacgccgaaagatgggtcaaggaccataatggtctcagtgagcaattgaagtaaaggaccacatgtttgagcttttcttgaaagattttttttaaataaataaaagggttattgagctcttttttcccctccctttcttttaacagcacctttcaacccaggagctgccaaagaagttataagccgtgctatgtatagaagccacgtcactccctactgaaatagagaagagcagcatctcccccacagcattgagggaaagaagagggagcaactgggtccagccaaaacagggtgtgggggtagggggctggtggggtcggaggagtggctgcaaccctgcctggtgtgtgcagggagccaacacagggagggctaccaaggggggccactgccaggaattgcagcatttttgtgctggacagagctgcctcagggcatctcattcccactcctagatgtaattgatcatatttggaaaggccctcagggacaggaaacttgataaattcccattccaatgtttcacgaccctgacagtaaaggagctcatcctaataatgaagctacaggctgcttcccacagtttaaatgcatttccccttctgatgtccttcgtggagatcaggaacagctggtcactctcctccccatgataacccctcttatattgaggatgggtatcctgttgcttttcaccccttgctgcttcttattaataaaaaaaaataaaactccaatttctgtatcttgccatcaaatgcccttttcctttgtcccaactcaacccatcatcaccgtccttttttttaagtatattttttcttctgaccttgttgcaaaattgatggctcaggagtaaatatcattcccattgtaccatcccaaaaatggaggcatacacattaggaccaggtgaagggaaggaaatgaatgtgtgctgcagccctcccctttgtaagctgttccccacattctctgagtgaatcttcaaaatcccaacctcctgttcacaaatccagaagttaagattcagataagtaaggggttcaagatgatctggttaatcatcaccacagctgaggtttaaattctgttcacaagttaattgtttattaacttgcagaccagttcagatcaagaatacattaactcagggccaggtgcggtggctcacacctgtaatcccagcactttgggatgctgaggcaggcagatcacttgaggtcaggagtttgagaccagcctggccaacatggtgaaaccctcatctctactaaaaaatacaaaagttagctgagcatggtggtgcgcacctgtagtcccagctacttgggaggctgaggcatgagaattgcttgaaccagaggtggagactgcattgagccaagattgtgccactgcactccagcctgggcaacagactgggagtctgtctcaaaaaataaaaataaaaaataaaaaaataaaagaatacattaactccattcagagaaatgcaaatcatagcgtcaatgagcaggagatgccatttcccacccgctgggatggctagagtaaaggatagaaaatgacaagtgttggtgagggtgtgcagcaattggaaccctcacacattgctggtgggaatggaagtgaggtggctgctttggaaaacagcctggcaccttctcaagtggtgaaatagatttactatatgatcccaaaattccactccttgaaatatatgcaagacaaatgaaaacatatatccagacaaaaatgtatacacaaatgttcatagcagcattattcagaatagccaaaaaaggaaacaatgcaaaagtccatcagataaagaatgggtgaataaaatgtggtatatccatacaatggaatattagtggcaaggaaaaggaatgaagtactgatccatgctacaatgtggctaaaccttgaaagcattatgctgagtaagaaagaagccagacacaaaaggctacatataagattccttttatacacaatgtccagaatagacaaatgtacagagaaagatagattagtggctacctagggctgggggccatgtggagctggagagggtgatggctaagggatttgagctgtctttttgcagcaataagaatgttctaaaattgattgtggtgatggttgtgcaactctgtaattatagtaaaagctactgaattgcaaaagccattgacttgtactctttaaataggtgaattataccaaatgtgaatatatctcattaaagctgttttttaagagtactttaaattcaaaaactctgctttttaaatgtttgagaatcctttgtccttataaagaattgattcaaagttccataaagcggattcagtttccagattgtgttgataagacttgcccatggctggccaccccgtcatctctagcagagggtgtgtgagaatggccgttggctccagcttcctgggaggggagacccaaggcccaggaagaaagcgatgagtcctttctcatccaaaggtgcatgcccaagatacctgctttgaggtacttcccatccaccttctccattacaatggaaggcaacaaagccaacaggaagcaccttgtccatgtgcaccatgagtcaagtcacatgtaggacccagccaaggacctagagtccctgccacatcccagaaccacacttaggtagcaggtaccaggcctctgagctggaagcaatgtgggggaagatgcgcccacctcctgctcactcctgcctctcttggtcattccacagagttccagagaaagagataaaggagacaaagaaagaaaagaagaaaagagcatgcagagaccagttggaaaataaaagggggccaattccctcttattaagcctgttattaggctgcgaatcaaattaaaccacagggctttccacttacagagtgctattttaaggcttattagactatattaggattggcatacatttccactgacataatatcggcctttaattggatttaagggcgaggaggctgcattcagctggaatagggtccctgcaaggagaaacttgctattctcctcacagcttccccacttcccctgctggctgccatcccaggggctgggcagaccctgtaaccctttcagatccaaaacacagcttttttcctcctcctcctcctctgataagtgcccagaggccgaagcaggcccccctctcgcctacgtgtgcccatccctgactggccagcttccggtactcggtggctgtaggaggtgcagagctgtgcgtgcctgccgaggctgggcagcagacttcagactgtgagtagagccccagggagggaggccagcctccccctcctgcttccaagctgccgtgggcgagattggcagtgggaggtgcaggagtttttcatgggacagtgatgaaaagggggacttggggttggaagcagagtttaccttgacctttgaatctcctcccatcccctgcctggtcaatccttgaaagaccctcaggggcacgtggtagaacctgaatacaggagggatatgggaaaaagttcacacactatggggaagcgaacactctccgggctggtggcagtttccagacacttgtgaccaacttctcaaagctgcagcatcctcctacgtaaaataggaacacgctttccttccactcgggattgctttgagaattaattgagataatacagctaaagtggtgagtaggaggcttaataacgtttagtgccttctcccctttgctgtacaaatttcagatctttctaccaaaaggcatcataaaagtaacagacctcaccagtcaagtacgttgcaaaataatcttgggaggggaaatatcttggtacagagacaagtatgtatgaaatatcacttcccaaaatattgctcaaacatgaaaaaaaaatcccaaattccttaacattttccactaatatatgtgaacgtcgcctgctcccacttgccaagatgtttcttggctatactttgatgtcttcaatttccacgcttgtttttagctcttctgccagagccatgtgcttgtttatttttactacatttttatgacgtttctgctattgcaataagttttgcattattagttttatcaaataacagaatgtctggttggctggctgagatttattggcccagtttttatggctccatcccagaacactttttgtgattactttctaagttgttcttagatccattcttaaatatgtgcttattcctttattaaatcacatctgaggactaattgttatggtataaacttagcatcagtgcaatgccaattgctataatcttaccattattacttaatcacaggtttgtgtactcggttctatgcaacatatatatatatatatgttggaaaagttgcttggaaagctgaaatttacaaactgcatttcttcctatattcactaggaagtttctcctcctaatacatattatctcaccttgaaatatctgtttggcaagttctgtttatttgggatgttgactttcctgaagctcgaggaaaaccttattacaaaacaaaacaaaaaaacacaagcatgatttatttcatccctgcattagcttcctctgctgttcttatttgacccaataagtctatgaatgacttggttctatggttgagaggcagagaaaggatgaatttcctccatttattatggggagaacttgaggtggggggcaagcagtatcttgctcagccctgcaatgaggtgtcagttgtcctgttttctgcaaggaaggtcctcatagcctggcaataatgaagtctgttgtgcttcttgaaagctttgcaacccctgaaagtctgaattcttttcaagtcagatctgttttcctcatggagcctgagcccagggttttcttctcccgtccaacccccaacacatgtcctcattgctcactgacccccagagagttccacatcagtaagagtgggacctcctggaatgttcccccaaggggacatcaaaggagcaactgtcctggcgggtttggattaatggcatctgaatcattacagccagaaatgtgtatgcctgtaagcctggggcaccaacagtgtgtgcgtgtgtgtgtgtgtgtgtgagtgcactgcacactgagcctgtgcatattaaggggtttaaatcaggaatgagcgcaaatccacaaacatgtatccctgtgaactcacggtactcacaatttagccaggaggagtttttatttgaaacccactggggtctaaaatctttttagggctcagttttctggagttgaagtgttttacattcccacttctgctcctattctactacagttcttctttccccatcagggaatagactattctgatggcagagggtggtaggcaggagcctttcataaaaataacttttgatcataatgcatcatcattatcatcagcgctatttagctctaacgcaggtaggtcactggagtaggggcaggcttcttggtgaatggctcttggatgtgcttttttgtccacatgtgtgtgtcctaatgtacccctgctctgcagatggctctaattaatcaggacagtgaaagctcttggagagggattctttttcttcaaaaaggaagatgctctagctcctccctccacttagcaaccagcacgtacagatgtggcaaaggcagagaaatagagaagtggtaggaagtttcacaagggccctttgggaggcaacttgctgacagccacaggaaaatgtggagaaggtgcctgagccccttttcagcatgagcataaatgagtctagtggttgtggaacacaattcgtaaaagatgacacaaatgcctgctttcttctactggtcttattttaggggtgttcaggatccaagtactccttccttaggtgaaactctccacgatgggaggtcttggtttcaggcaggaccaagagcccccactttggaagttcaaagagccagatgccccctcttcctgcctctagtggtcagggccctgggctggttcatgaagccttgctcccaagcctttggatctccagcaggtaatgcactggtaaggaaggctgcttagacacttttcaggatgtcagtggtgagttaccgcagggatgacgcttcctgctaagagatggctatcacccttccagcttcccgtgtcccaattcctgaacttcgtccaagtctgttcctccagctagccatcaattctgggagggcttgatatccttcttcataaattccctttttgatttaaaataacctgagtcagtctctgttagttgcaagtgaaacatcctaactgataaatcccccaggacagctgacgtcagatttcattagctgaaaggggtgagccccactggctgtgagcaaaaagtgcaccccactttcatcacaagtctggacaaatgagactgttgggtgctcggcagactctcccattcagccgattaatatttccctggtactaaccatgtgcctggcactgccctaggaatgagagatgcagccacaaataggagaaaatcccttttctcatgtagtttgtatcctagtgtgggatgagacaagcaattacaaataggcatataaatccctctgcctatgcctaggaagagagggaggaggggtagagggcaagggggaagggggaaaaatcaagaggctttggggagggagagagaaggagaaaaatggagatcatatgatgccaacagagaaaagtgtttccagaaggagggagtattcattttgtaaagtgtacgaggaggtaggaaggtaccattttgttaaatgatagagggtagatttctatagtaggacaaggctgagaaatgaccccaacatatcagtgggcagctgatgcaggtttaaggggaagagcgaggagggggtttaggataggagagcaagaggggagatatttaatgctccttttgaacgtgcattaatggacttgggatatccagtttcgaagaactgctttagaaagggaaaccactttactcatacaaggtgaagacatcttaagccagatcttcctagaagctctacctggcagatcggtgagaagctggggttctatttttttcccaactgggccctccagtgggtctgtttttctatccaggtgctcaaatgggaaagcctgaagctcagatacagctgtttgtgtaaatggcaaagttgggtttatagcaatttaatcagcagcattaataatgtcacctaagcttaatgataccaattataaccacagtaaacattgctgagccgtttataaacagtgatgttcaagatgaacttcctgcatttggtcaatgctgttgttaaaaaacaagactagaaggttcatgttttgaagattcccatattctcactcctgtgctgaaaaaacagcgccacataagggcaaacccctgcaaggatgtcatcctcttcctctcttcactacctgctttggtcatttcccaaggccagatctgcatccaccgctgttgtccaccaaaacagagtaaggctacggcaggagtattatggacctaaccatgccagaacaaggacacagttggataattattctagcccaggcaatattggttccctctattaagcaagttctgagaagtccaggggaaaacaaaagggattgttaaaggtcagatagagcccatcaaaattctaatcaaaacagaagttggaggcaggacttcgtaagagctattcctctccatgggtggctctcatatgagaaatggaagctagccttccttttctgaggaaggaacatgtattagagagtcaaaagtactccctgagggattctaattagaggatgaggaagacagaggggcctggggaaggattcctaaggaaggttgtgaaaccacctgtttccaaagggcttcaacgttaaaggcaacatctctgcctatgagaggtgtggtgtccaaatggagagatgggtgttggctaaggaatgtcgaccagccagagtctcttccagacccaaaagcctggaaaaaatgtacatgtggctagagacaccatcttcatctaaaaacagcagaactttccaacctttttcatggcagccacaggaaatgataatctttgcagggcacatggagtaaacagaggggaggctggagagccagcctgctcagctgagagcgtggaacactgagtgccaagctctgtgccctgcatttcacatgccctccctctttcctttgcatccttcttgccttcctaatccgcctcagcaaagggcttcttgcacggttttctcgtcatcaggagtgcatgtctcaaggaaaactgctcttgtccacattctcagccaaatgagagtatcaattcatttgttcattgtaaatagagtagtgcaatagtttggtcctgaatccgtgttcagtttggaatcttaagagaccaagatgccaaaatacctgcatggcagcgtgttgtctttcccctggttgccatgaagataggatccgctggagcctctgacatcccatctcaagcatgtgaggggctcagaacttttcctaagaggaattaaggtctgtcctcattcaatttgtagaaagccactcagccttctctttgctgccaacacaaaccttcttttcagtctaacctccctgaagatagcagactcttcaggggattttactgcagtgtttggaaattgcattgtgtttttatagatttgtgcgtacacctggtggtcttagaactccacaggcaactctagtaaataaataccagctctgggccgagcccaagttaaagtgaaggattttgttaggccaaagtcagcgaaaggaattacagagaaatccatgccagaaagcaggagattgttagacacagagcactccattcaggggaaaggacaacaatatatttttttcccagccagtgtgtctcaatggagatgaggatttgtgaacaagattcaaattccactgccaccactaacttgctttttagaatccaaaatgaagtcttcctgtgactgcgtctatgtggcatcaactatttggaagggaattgagacgtttatttaattatccagatattttgaaatatacaaatcctttttgttccccacttccaattcagatgtttgtcatctgtagcaagcatgtgtgactcaggtttctcatctgaaaccggggttgggtggaggttcaagttcacttgtctacaagggatgccctttctactaacaagtgagcctgaagcaatatacccacagtcttttgggggagagcaaagttttaagaaaagatattgcctgccagtgtagctagagagcagtagctctcaaatggcctagtaatttggaggagagggttggtggagaagaaaacggaaggaggatatgactgtgttttattagattacttggaagtaattagccatatagaatctttgggtatggccgtttagaggttccaggccattatttactcacagttaattccttaatgcatgtgttcattcaacaaatattaagttgatgcctactctatgacagtgacttgggtaggtgctaggaataaagggataaaaacaagctttttaaaacaacttctacaagtgagtatataattacatctatgtcaagttctgtgaagaaaagatgaatgcagttatgagcgagtatcactgggcacaatctcataggcagggctagggtgggcttgctcaggacagagcagggtgattgagacttgaaggttgaagacaggcagggccagacaaggcaaggactgggaaggtcagggtcttgcaggctacataaggggcacttgattttatcatggatgcaaggagaatccactgaagggcttaaaatcatttagaagaaaaagcaccagaatcagaccacctgggctctagacccagaccaatggcttgactagtgaggtggccctgagaaagccattcgaccttcctgtctcagttttctcctctgcaaatgggtactacaaagagactcaaagttagacctggaaggcacctgagagttttgttttgtttttttatgttcagccccctcctatttcagaaggaaaaagtcaaggctgcttttttttttttttttttttttttattcctgagacagagtcttgctttgtcacgcaggctggagtacagtggctcaatctcagctcactgcaacccgtaccttcagagtcaagcagttctcctgcctcagcctcctaaggagctggaaccacaggtgcataccaccatgccggatttttgtatttttagtagagacggagtttcaccatgttggccaggcaggtctctaactcctgacctcaagtgatctgcctgccacggtctcccaaagtgctgggattacaggcatgagctaccgtgcctggctgtcaaggctcctaatacctgttctgttcacttcatttgactgtggcagtaatcaaaagaaataatacatgtaaacatattttgtaaaataaagaaaaatgtatacctaaggtcttaaattattatttctgatctctcccaccctggccacaaagactcacacatctcaatgttcctaagtattaagacaagagagataaaaatagagatttgcctgcatgtgtctacgtgtgtatgtctgtgtctttgtatctaagtttttacttcattatctatatctagagagaaaaaagaaaaaagatatttgagagactggatgtagttctagggcattatttacagggagcggggaagtcctgaaaaataccttatccccttgggagcagtgacctaatcaagatggcataattgcctgtcttatctaaatgaaagcatcatttgagaaacagtaatgggcctcagtgtggtttcaattgctatatagttctcaattgctattgagttctcatttgccatggagttcagcggctgaagggtaattataatgtttaacaaatatattccctttagggacctgatgttaaagacacaacatcccttttcttatcctaccagattacacagctcccgggaccattgctatgtaccttaaaagcatgggcactttctctccctaagcttacctttctgccaggcagtcactaagaaacacggtctcagagggtgggagagaccaagaagtcaggacctccaggtgggcctgtccctcatccacatgaagctgccatgagagttcttgttgtccctcaggccttgctaatgaaccccaagacagcttaggagaatatgctctgtcaattattcatccccgccaggtcccaggcatcatctttgcctatcccattgcacgaagacaggagattataaggatcagagcaaaggtggtgctcactaaaaatacagatcagatactcagtttctctttaggactatggggttaccaaaaaataagggtcccgttctatcctttccttagcaagcatatagcatactcatgacaggtcttgcagtgacatctgagctgaatgatgtttcgacaacaacaaaaagataaaaatggaccaatttggaagaagaggccccaaaccccccatagagttgttgcaggtggccagtgcctctgtccacctcggagctcagaagatggcacagaggcctgcgtgcttgtagagagagagacagtgggtgctgccctctgcattgggctggctttagcatgcccagtcctgcacagcaccctggatagcccctgtcttgttcttcttccacctcaagtctaccgagtgcattctgcttggagatgggggccacatctgctgaatgcacattttatccctggtggtggctttgttcttaacctggcataggagctcactaaatgtttgcagaatgcatggtaaatggagcaaagagatgagtaaaattgattgtattacttccagctgcctgacagtctgcttgaagatactggccttaacatggatcgtcctccatgccatccacttccccaaggactcagctgtaatgagcgctagggggtgggttgctgctctgctccagatgtgaactcatggggtactttccagggaaaactaggaagaggtaggagagagagaagtgtcgcaggttggcagatgacaatcatgagggctgtccactgtgccagcccagtgacagaaaccagcctcttcaaaggcccctgcaggcccacgatgccttgtgtgtgcactcactgcttggagaacagagccaacacgtgttgtgctgtaggtacctcgtgggctacagaaaatgatgcgttgattgatttgcttattgggccttttatttattgtgcccagagtgatgggtgaatttagtaaaggaaggaggaaagggacaatcaagtttgagaatggtctgtcagctgcagagaggctgcaccacaaccagttattagcttagaaaataagatttctccccaatcctcactttctcttttgctaagagaatattttttccaacctacattaatataagaaaaataaaaaatgtggagagtggggcagaaggaggaaaggttagagcaggaacagggagtgaggccagaaatttgtttaacagaatcatttctgtgcctccttgaacactttgattaaagccaggggactaaatcaaagccactgaaaggaagaataaaaagatgtctgaaaacaattttgtttgctggaattttccctcctgtgttctattatggtgggggtgtggctgtgtgtgtgtgtgtgcacgcgtgcgtgaaaaaaagttctattttgtcctcctttgatctttcaaagaaaagaacatttaaaaaaggaaaagaagaagagaaattgatatcaatattgttccttttctttccttcacttccatcaataactcaactggatctaaagtgaggtatgaataccaattaagcccaggcaatccacaaatgaaaacctgcagcatgtaataagagagggtttccaaggccactacagccaccaggggttctcttaatcataggtcctctcccctcccctgggcccacttaagtcataagaccatttagaggactttatacatcatcaagtaaggccaagatgggaagagcaagatggagaggcctccagttcatacttccgtcttcaatgggtttgctgtagagccacctgcagggagggatcctattgatgtggtagagctgctacaatctcagagaagtggcttgagatagcaatattcaaataagacaagaccataagcactcatttctgggttgggaattggtgtaactagcccccttgctctccaaagaggaacacacgctttctatgcatcttcaaaacttcacataaaatagtgataaatcaggggcacccagactaagaaactgatgcaaatgctagaagtgcagagatgggagtaagctgcaacttgcacgctaactctgactgactgatagtgacttcctatagtgctgtgttaagaatgactatggggttgaattttcacttagtcagaaagtatagtgacccgttaactgatgtctgccataagggttagaagaaagtcctggtatcacatgctatgtgtatgccaacctggtacacttaaaagaacacttgacttgaagtcaaaagactataaaccatgactttgggaaagacacatagcttttctgagtcacaggccctatcattaaaaataataataacaacaggaaaactaatgtacatatatgaattttgtaatttgtgaaatatgcatgcatgctacctcttttattgtagtaaagtatacatagcataaaacttgccattttagctatttttaagtgtaaagttcagtgtcattaagtacattcacactgctatgtaactattaccaccatctatcttcaaaactattttatttatttatttttgaaacggagtctcactctgtcgcccaggctggagtgcaatggtgtgatcttggctcactgaaacctctgcctcccatgttcaagtgattctcttacctcagcctcccaagtagctgggactacaggcatgcgccaccatgcctggctaatttttgtgtttttagtagagatgggatttcatcatgttggccaggctggtctcgaactcctgacctcaagtgatccacccatctcggcctcccaaagtgttgtgattacaggcatgagccaccgcacccagtccccagaactattttatcttcccaaactgcaactctgaatccattaaacaacaactccccattcttcccttcccctagcctctggctaccatcattatgcttcctatctctaggagtttgacaactctaggaacctcatatgagtggaatcacacagtatttgtccttctgtatctgacttatttcacttagcatatgtcttcaaggttcatccatgttgtagcacgtatcggcatttcctttctttttaagactgaatattattccattatattatatggatagaccacatttatttatccattcatctgttgatggacatttgggttgcttccatcttttggcttttgcgagtaattctactatgaatatggttgtacatctgtttgagctcctgctttcaattcttttgggcattacccagaagtgtaaccgctggatcatatagtaattctatgtttaattttttgaggaaccatcatactgccaccatctgttcttacatttcaattagtaatgcctgtttgaaaaactttatagagaagttgaagggtcacaaagagataaaggttgaagaaattcaagttgaagtcatccaggtatggcctgggcctggccaggggcacatggcaaattgccctcacctcctgctgcccaggctgtggctggcaggctgtcttgctcagcagagcaccagggtggaggagcaatagcttgaatccatcccctttgccactcgtctggtgtggtccctgggccaggaccagtgctctagtggggaagaacattctcactcatcagcagcaatgtttacctgggcagggcgatggctcagatgccaccctccagaatgcagaccccttcgtgggaaaggcggggctgggtatggggagggaacaatggggaggaatgggcagacatggtgggaggaagccattcacattttggttatgacatactggtgtctagactttgtcatatggagcaaatgacaggatatttggatagaaactcagctttcaaataatgcgctaacaagaaagaaacgcattgcctttctttgttccccaaagctctggcagctggcgagatcagagctagcctgccagagcacaaagctttagactccttgtcctctctgcactggggcagtggtttcatgtcagctcacagacattaagaggttgcgctgcctggatgcagcccagcccagggcattgttgacatctgagagtggcagccagctcgacaggctcttcctttctccataaagtcattgagaagtcactggacttaaaagggcccacagagggtcatttagccccctttctgcctggactggacattagcaaaaccatccaaaactatcaggaattttccttatcaccaaacatacccattccgtggtcttgctcaggggatgtggagaatgacggttcctttttctcactatgttcgtagtttcatcctgtggttgagctaagtgggctctaggatgggaaaaacccagtttgactcctagggctgatacttctagtgtgtgaatttaggaaaattattacaataactacatcgcttaatcctcatattcttcatctgttaactggagaaaacaggaatgcatgccttatctcagttaataatatcaggagcctggcacctaaaagcacaatgtaagctctcagggttattgtcccatgccaatggagatgtccccctccctggggaagactgcaccaaactctccctgacagacgtccatcctcgtgaatgcccttcctaccagggctcctgagagctggatttgggcatttctgggatagcaatggcttctcaccaaatttgaaggtttaggaaacaaacttaagggctcatctcattgaagtctatgtctggttcatttaactgctccttcaataagctgagagagctcagcagtgagtccataaaaagcactagtgaataatggtcccttgagtacactgcagaaggtgtcccttcaggggtttccatgccctgctcccccggtctttcctacggcccgcgtgtgtgtgtgtgtgtgtgtgtgtgtgtgtgtgcgtgcgcgcgcatgcatggggcaagagtgtgatggtgagtggggttaggctgaaagtcagaaaactggattctatgctcacctctgtcttcagcaagaccctccccctttgggggctcagtttcctcatctctaaaataaaagttgtacagtttcatttctggaatgacttgtggttcaatggatccatcattccggaactgtggctgatgaataggaaaaccggaaaagaaaaggaaggcatttttacatgaggcagaggggagaagtgaagtgcaaatccagggctcctgatacccagggcacacaagaggagattcagagagagaagacaggcatcagcaagtaaatctttcctctgccaagtgctcttagatagaaacccagatccctgaggaaattattgaaactcaattcctttgagaacgttaaaaagtgagctagcaaagcacattgtgaagaggaaatctgggtgtcctgccccctctgctttcatgtcgctaaccacaggagatggggctccttcaccttcacagtccctggggtgccttcctatctttcagggagcttggggactcctccagagaaacagtaagatgagttacaagccgtgaacctgtctcagtaggactgtctagttacagggagctccatattaagagaaattggaagaaacctgtaatccaatcatgaagccggggatggtggtgagttacctcctgaaacacacacagtacattcagagctccaaaaacattgtgcaggagccagaggtgagagcctcagttctttcctcacttccaggaccaagagggtctgtctttagggtaatagaccctgtgctttctgagtcttgattttcctaccattaaaaaaagagagaggctaggcatggtggctcccacctataatcccaacgctttgggaggctgaggcaggcggatcacaaggtcaggagtttgagaccagcctggccaacatggtgaaaccccatctctactaaaaatacaaaaattagctgagtgtggtggcgggtgcctgtaaccccagctactcaggaggctgaggcaggggaattgcttgaactcaggatgcggaggctgcagtgagccgagattgtgtgactgcactccagcctgggcaacagagcaagattctgtctcaattaaaaaaaaaagagagagagaattaaataagaagtatttctttctcttggctacctcaaagtaggggcttttgggaaatcaaaagtaactatttgggaagaagaggaatgactgatgttgcagaaaagacattccagcaaagggccatttaaattttccttggaaatattagttgaaagaataattgacatctgctgttggaatatgatgatgagagctttaatcttttttaattatttaaaaaaacttttttgagacagtgccttgctctgttgtccaggctggagtgcagtagtgcaatcatagctcattgcagcttcaaactcttgggattaagtgatcctcccacctcagcctcctgagtagctggaaccacagacacttgccaccatccctagctaatttttttgttgttgttatttttgtagagacaggttctcgctatgttgtccaggctagtctcaaactcctgtggcttaagtgatcctccagcctcagtctcccaaagtgcttggattacaggcatgagccactgtacctagctggtgagagcttcaaataagctaagaaagagatatctaagattacctggaaatgaaactcttgctaaacatgggctctacatgtggatatagagcaagtgcaagttgcaaatcattaactacattggctatgttcaaggaatagaagtgaaaatgctcagctgagtagccctgggctgggctgtggtggccacacagatcccttgcctagatccagagcctgctaaggatggtggcctagcagctctgtcatggactatgaccaaagaagtatttccaaaggatcaccatacactgaactcttcaggcatgacagcaagtgggcagcgtaccaccctcaaaaaggatacacactcgggagtgaggtggcagggaaggagggagatacagaaggaactgccatggagcctggaagaagaaagggggggtgaaggtattgggaagaaaggatgaaggatgcaggtgaggggtggggtggggagcgggggatgaacgcaacacacaggaagaccaagaaacccggaagaatcacgagtacagaataaaaccaataataagtccccctctcatgcaggggacatcattagagatgccacggtccagaggaaggacacatcggctgatacagctgaccacaggttggagcagtgcatctctggggaacatccatgaagaccaacagagaatgagaaggacagagcagcaaagggcacctgcagggatggaacagccaccaggagccagatgctttaactgaactgacttgagttgaaccctcacaacagacccgccatgcaggtacttattagataagagagccgaggaccaggaaggccaaatagctggcccaggttcccccaggtgccagcggtaggactgcaattctgctcgtcgaagccctctctcttccaactgtgacacttttctcttaatgctccaggcctgacggagggcagagatcacagggggtgtagaaaggagctttttgtgatgacatagaaaatacccacgcaccatgggggcagttggcaagagaggagaatgtcttggaaatgggctggacagcagggtgttgattggggccaatgtcaatgctgggcgtgatcaaaggaggggcagtgtcgcctccataagaagggagaacgaagggcatttagagggagtggaacagcagcttatttgagtattctattctgcttagtgtttttcctttaggttaactatttgatcaactactaaggtatgagagaaaagaaaagcaacaaggagacatgggggaagagagctggatggggagggacgcggctgcacccacacagatcctggctccctgtcgctctccttcctgccagcagctcctgggcctgccaggcatccagggaagcagctgtctgagcctaagcccagctggcaggaacccccactgacctggggaccagaggaggaggtgggctgtggtctctcctgtcaccctctgtctgcccaggctgacacctggagtgtctagagtggggccctcagctgcctgcgctgcggctcacagcacctgatggacacacaggtgtggcgcgtcctgctgggctcaaagacacctgctctgggcaccatgcccgtccccatcaacagttgtagatgaggctggagctgagaagaactgacaagcagacgtctgctgaggagctgggccccgccctgaaggaagacagcccagccctcccaaagcacatggttgccaggtgaaatttgcagtcaccagccgccagccatgtggtgacattggatttcaggcaatgaccttgggaacccacattgcatctgcagcaggtgtctgcattcacctcacatagcactctgaaaatgtttgccgctgtcagcaccacctgaaggggcttcccctgcagtcctcttttccatccaccctcccctaattcagaccatgccatttctctatcctgccgcacacctccacatttgagttttcctgcttggatctgcctggcctgatgtgtctggctgctcagagcccagagcctctcccagccctttcacagaagatgagagaatccctaacgcctctgccatttgaccaagacagctcctttcaacttcctcttcccctcgggcaaaatcagcagcagagacaggactaagctgagtggcctaagcccctcctttgattctcaggcccccagagccacccaggtgccagaaacctgctaagacgtatcaccagaccccttgctgatatcataagcattttttccccttctcagcaaaactgacaggacatggcttcctggaaaggaggtgaggggaggagtccccaagcctggtgagaacagagggagtgctggtcgatggcccctgtttctccactgccacctcaagaagccttccaaggagggcagactaatgcttgcactggcttggctaatggaagaagccaggggggctgtgtggaaagaatggaagagcccccagtgggcataacatacaccaaaaagagagggcaccgaccatctgtgttgacagagaaggacatccctcagtagccatcaccgaaaagcaggcacttcatgtctgccctgaaaccatcactatgaacaaagagctcatcaaagaaagggaatttttatagacaccctatagaggagtgattttgattcctaatctgtccattacggccccccgagaagtaggtataaaaagatgatatgcggccgggcgcggtgcctcctgcctgtaatcccagcactttgggaggctgaggcgggcggatcacaaggtcaggagattgagaccatcctggttaacacggtgaaaccccttctctactaaaaatacaaaaaattagccgggtgtggtgccaggtgcctgcagtcccagctactcgggaggctgaggcaggagcatggcatgaacctgggaggcagagattgcagtgagccaagatcgcaccactgcactccagcctgagcgacagagtgagactctgactcaaaaaaaaaaaaaaaaaaggtatgcagtgtggtccctgacagcaggtttgagctcccttgcaaggagaactccagcatttaatgcagaagaggcaagagtcaacttgggtgttcttccttcccagtcttagctctgagtgtagaaaatccaggtacattcctcccgaaatgctgttctggtgagtggatgcagagaggctgcccaccactgtgttatcacagatgccaccctggcatgagatgcaagggaagtagaggcagccatctggggatgggattactgggaagcccacaggcctcacaagccagaggcaccatggtttcttgacttggacgtggcctctcaaatgctggaggatgtccagcccacagcctttggtgatgctctcctggccttatttagaattcttaatgctggcaaacaacttttataaaattatccatttgtatttggatgcatacataaaaatatcctttatctgtatttggttaataaaactagtcttgctctgcctgtatttagcggtgccagctatcctggactctgtttgtgtgcctgtgtatgtgtgtgtgtgtttcattgtttctattccaatcatatcactaataaatgtctatgtataacaaactcatgcagaggagcagtgagcagattattatcctgcattctattgactccttatcacccctttccctgccctgctcaagcccctagatattgatgggtgtgactgagctaggccatcctctgctgttaggcaaaactgtgttcctgtgtgggcataccacgtcccaggagtcgacgactcacttttgccctgagggtccccagtgaggatgcacgtatgcctatggcaggcagggagagctgatgcctggttggcatgagcacctgaattagtgttggccacatatggatggccatgctggtgggcagaggcagaggtcagggggcacaagaagagtggaaaggagatcccagagaagaagcacatggagtgggaaaggcacgcttccaggttagggctggtctgcagacacacatgccccgtggttgggctggggagacgggttggggtggagagggaaatgggggtggggagtaacacgtgcaaaggtggaaatcatgaaccaggttttaagtcctttggctccgtgttatgtatacagaaggcacagagaaaagaatatgggaagttaagactgggctgtttgggtgggcaaggaaggagcttaccaaaaactgtcccaggagaccctctgagatggcccaagaccctcaaagaaagtggcccaccatcctcagctacctcttctctaactttcggtatcttacagctattcctgtatctccctaatctcaaatcacttcttgtgagagtttcctgccaatgatgtcagtaccgcttagatgtaggagcatatttctggacacagttccctgaataaagacttgggatagaaaattaatcctccccctaggagttcataaaactggggcaccgaggggactgatggctaaaaccaaagttgcagtgagcctggaagggaagcagccacttgggagggagccttaaactcgagtggggacggagacagtggccaaagatgttcacagccgtccttgaaagggatgaattaaagagaaggcatcaaggacagtaactcctttatcaaagcccatggctgggcctctctgatcagcccctgcctcctgacacacaaacacacacacatacacacactcacacacacagtctagaccacacctagccactgaagagtgctttaatccatgaaaacacactgagaaataactctggggaaacttgattgggaaggtaagcctgatgtgaaaaactgcaatcatgcatccaaagccaaaaagacatgatcttttgattatctgtgccactactctgattaatgattgttggccatcgcctctagattgacacctgcattatttttgtcccagcctggcttatctcctatcagtcaacgcatcacccacactcccaccagctgtactcaaggtggtcaggcacatgagaatgctttgggaaagatttacatcacgtgacctgtcatgtggcactacattagggctgcaggaccagctattgagcaaaggtatcaccccttccagcaatgagcttcaattttccaatccaaaagaagcagaaacaaatggctaaaaccaagtcagagatgataaccttgagtggctctgctgttttgatgtttacattttcccagaataaactgtataccattcagtatcaccacacagatcacacacgtggcgtggcctgggccctgtttactcaagcagtttcttcttcattgaaggagtccctcctgttcctttaggatttgtggatgacagtcctctgaaggaggtcaggtagatctatgcagatccttcctcccagtggcatcagctcagctactgcaccacagccttcaggcaggagtggaagcccccacaccaagcaacgtgtcctctctatcttcattacctccaaggtctgatgttactcaccctctcccacacctcacacactggaaaccagcatgatgcattagagagatgaagccttttagaatcaaacaaaatagaacaaaggttcaattctccagcacctagtagtgtctgacataaaataggtactgcataaacatcaatacaagatattctggctctgtcactcaccaacagtataattttgtgcaacatctggaagcctcaactttctcacctataaataaggaaagttgagaggcttaaagaagataatctttgtccgtgggttcagcagagggcctggcgtggagagcatggaagtgccttgaaaattggcatttctccagcatttattaacaaaaccataaaataatttaatgctatgccaactatataatgccaaacatttattacttactatgtgccaggcacttttctgagggcttaccatccattatcccttttaatcttcaaaatactatgtcgttggtaaatatcattattcccattttgcacgggcactaattccaagctttgagatggccagggcatgatgtggtcaggcagtagaagtaatgataaaaccagtagagcaggcaagacaagccctggctgcccatgagtctctagctgaacttcattgctaagttcacctttagccccagcaaccagggatgccaagtacacctttccccagaggactcagtcttgcaatgttctctccaaggtctggagaagtcaagaggaagggaaggaaaggaagaggcttccaggtcttagtgcctcatgccctaagattctatgattggtgccaggcctccgtagctctggatgtgcataggttagtgaaaccagcagagtggcagctggaaaggttcgattttgtgtgtctggccatcagctcctcctggactaagggctgtagatgtacacatttttctggcttgtcttattttccactggaaatccagatcccatcaatgctctaaagctggggagtctactgaagttactatgttcaaactttaaaacaaatacacttgaaacccctgggccttcactgtgaggaaacagctcttggatggtttggctactaatttttggctttttagcagtggctttaaataatgaggtgcccatggaaatgcaggggtggaggaggagcaatacagtgacaacaaaagagagaaatctgggaaaatgggaaactttcatgggagataagaaatcttaccgcccttattaggttttctgttctatcagggaggtctcctggctttaataaaatctcattttccctttaaactctcccatgtggtagggccttgtatttaatagggatatataagagaggattccaacctgaggctcaggtggccgggggctccccacactccagtccagcagctgggattgattgcagagctgccagtccagcaacacacaagttgctgcacatcagagagtaatcatgagccatttgatgctgacctgcacgaagtgaagatggcagcttggctcccgttcattcccatttggacagagaagctcatcctggtctttattaaaagtggaccaaaggagtaagtgatgagtcacaatatgtgattgattaggggcatctgcatttgaaagcctccgtggccttcatccatgcctaactccttaaggttcccattagcactgggagattgtgttcattaggagccgctgatgttgataaattcatctttcctgtcacatgcaattctatccagggtctggctctcagttctgaggggctgatccaccttgccttaataccacacgacaggctccttcacaaaacaagcagggtgtcaaaggctagctgttgggagatgccaggcctacaccagcaaaggctggagggaaggaaagggtgagcagctggtaattagaagctactggtgggtatcagaacgcatccatcagatgtctgcagagaggaacacacccagagtatctgtgggtcccaggagctggtgtaggttctgggctattctttcacgattgccaaagagtcaccacttgttgaaccctcgaatgctaacaacagtttctagctctaccaaactcctgttttgccagctttgcccccaagaaaacagaaaagtcatgactagcaaaatgaatcagtgtgaggcacttgcaccaacagagagcatataatttttatctagcaatttcactatcaactccaacaaattcactcttaaagccagaaaagcattccagctttctgcagggaaaatgtatgtgaggggtaagccacccagagtcagttacaactaccctgtctgctgtgggacaagctctctgtgtgttcttttcaaggtgtcagagaggtctgatggacaatgtgcacaagtctgtgtgtgagaagaccaagaaaggcgaggctgtccccgccctctgcattctcatcctggataacccaagctcatgttagtaaggcctctgaggctgatgtccccatttcatctatgtgcctttttccaagacagacactttagctgggattttgagtcctactagtagaggcttgggcaaggccagagtaggaaagaaacctggtggggcagagactgatcgggctttccaggcccacatggccagtgcttacacatcttccatgtcatcttggtccttccccttaactccatcccgcccccccccacgccccagccctcaaaacaatttgggacaacatcattaaattcacacaaacttcttccttaggatccagaaacccggttgtcccccaagaggtagaaaaggctcaagaataatgccacatggacttggctccccagccccagttccactcatcaaaagcaaataccatgtgcatgttctgtgtgtggcactggagacccaaagacaaactgttgatgttcctgccctaaagggtctcatgcagcactcagtaagaaagacaggcagttgattaaataaccacagcacagtgtgatccatgccaacatggacatgctagaggacccagtagcagtccaggaaagggagtgattctgtctacttggggaagaggaggacaggaaggacagatcaaaaaaggcttactgaaacaggtgacatctgatctgagaaagagctcctagagcagtcaaaatggtggggaagacactgtaggcagagctacatgtgttcagtcagcagggtgggaaacagcatggcatgtgggggaacaaagcacaagtggggactgccagcatgaagaactaagtgagggagagcttatgtggaatttagaaaggaaaaaggcaaataggagccaaggagagcaagaagcaatatttccttccactccagccagtcccttatgtgaacagaaaagagcagacagtagagtttgagtcccaacgccactggcatgaccttagaccaatgccttcacttcaagggtctcagcttccccatctgcaaatttggaacagccccacctgtagcatctgccccatggtgttgttgtgagaatcaaattttgataaggttcttgaagtgttgctactctgaagactgtggagagctttggcgatgtgaaaaggtctcatcaatcatcaccagggatcccagcattggccgagggactgtaccaactttgccgaaagtccttggagttcacatgctaaggggaaagcctctattgctccgcaaggcaaaggacccccagccgaggatacagggaagggaagaagaaatccatgtctctgctgctgctccatggaggagcaggatgctggggttcctgtgcccactgcatcccaattaagtatctgtttctcctcatttacacttggctcagctctccaaataccttcctttaaaggattgttttttaaaggcccttcaaactcagcaactataaacactgatgttaggcaaggcactttcagcaagaagcaaccataaggaaataaaattgctgctgttaaatctccactcccaggaagcgatttgctcagcaataaccatttctcaggagccctgatcaatcactgtttgggcaggagagaaggccttcccaggcctcctgatttctccaccctgcagtggaggcagcgcccaccacctttaattttatccagcaggccctgatggtggctttggcctggatttggaaccagaagaaattgtccctgtgactgtcctagaacggacacggggcagccatcactcctgcctggccccacctgcacccagtcctccttgatcctctctgtcttcccaggtcaaccttcggtgccaggcagggttaatcctctctctgcttttagcaggaggagccaaatcccacctatggcaatgtttgcttctggagaaacttatcttcctgcattgctctctcttcatcaaacatgaatgccagcaaaaactcctttcccaggctcacgaaatgtgtaaaaacaaagtacagaaaaagaaatcctacactagattccccagatgttttctatgaggcaattggatctctctttctctctgctagaaaaggctatttaggaaaagccagagaatacgagatgcttatgttatgaaatatcagcccagcagccttgtttactgggacccagttggaaaaaacccagattcccaagtaaataacttctctccttttcctagcaaaaattgctttaaatgatttcaatcctaaagataattttttccaagccaagtgacctttgcctcctttttatagcctcccctagaatggcctgtacagaatgtgtttccctgataagcccagagcttttccagacacagtcttctacaaactcaaatgaaaaagaaaaaaaaaaaaaaaagaaaacaaaacaaaacaaaagggagagctggaaggatcaactcctctgttcccctgtgcaggtaggaaaactgaggtgcaagatgtgacatcctctcccatctctgtggcacccacacatctgattgggcagcacagaagatggggtaccacagcctccccttctacaacatccctcatgggtccacaggagcccctctccccaccttgctgcttggagagaccatttgatttccttgtgcccctcagtggccaccagcaccaactcagtagataggttctgctgcctacttgcaaatccctttgctctccagaagatatctgtgagcaggaaggtatggccaggggtaacgagtgaaatgcagagacctggggctgaggagagaaaagagccaggatggatggcaggggagagtgctgtttctcacagcacagcctggcacaaaagaaaagaacagaaacacacacccacgttctactggaggccgcgagctgaaactgtggtatgggagaggcaatggatagggctttcaggagcaatcctccaacttctgctgacatagcactgttcccccaaatattggaagtgagggtaggaagagcaccctagaagttccatcacccaccccacccaaccatcacactctcctggtgaaaccatctatgctattccccaattatcttgtttctgtgagaaacacatatgttattctcaagagtcatgacggtacctggaagggagcactagctgtggcagcttggtgtttcatgctgcagaggtgattgttgctctgtgggccagaggtctagtgttctcaagtcgtggaaatagtgattcttcccgttgaaaacttaacacgtgctttagagaaaagagtaggagtatttaactcagagctccagcttctcaccacccctggcacatggctggcacatggtatgtcctgggtgattatttcttgagtcattggttgatgccaaagttctctactaggcaacaatccctagagattagaaaggcctaaagcaggctgtgtcctgggttgtcacctctcccctagcatgtcatagttctgaggattgtgcccatccctgaggtgttcttatgagctccttattccctaaaaactaccagacattccaagaagtttcatggatagcaggcatggcagatgattaacttcctcctgtcatttcacctaggtctgtgatctctcctgcgcaaaatgaggttcaaagaaagagaatgagaatgataatgattattgaaaagtccctcccacctctgatattctttgagctgctaagatttgaaatttcactcaatggtatcaggaggttctgctagttgagatttagtctacttcaaaccagtgacagccaagacaattctgaaatgggcactggatcttttttttttttttttttttgaaatggagtctcactctttgttgcccaggctggagtgcaatggcgcgatcttggctcactacaacctccgcctcccaggctcaagcattctcctgcctcagcctcctgagtagctgggattataggtgcacactaccacacccagctaatttttatattttttatggagatggggtttcaccatgttggccaaactggtctcgaactcctgacttcagatgatccgtccacctcagcctcccaaagtgctgggattacaggcatgagcaaccgtgctcggccagatcttttatttataacagatgccataacatttcatacaaaattccccatgattggagatattcaagtggaggcaggacaagtggctgggttgttgtgtgtgggcaagggtggctgtgtactatgggaatgggtacattagcatccaaagggtgattacaccaggcagtgtctcatgtccctcctcatgtgggagcctaccacgcaagggagaaccaggactaggttgatatgacctggcttttacaaaacccctggaggagggaaagaaatggaggcagcatgtcaaagccttgtctgagaagcattcctttctccaaagcatctgaggctctgccttacagatccccatggaccttgcattcctccatggaagcctttgttctctgtattgtgatctatttacaaataccttcctcctcagactgtgggctacttaagaacagggctgtgcttctactctttgattataatgtactctgagcaaccagcatagtggcaagagcatcatcaacatcagtcaaatgttgaaggaaagagtaaaagaatgaagaaataatcttgttcaaggttgcaaaccaccagggaagagccaatcttaaaacccaggattcccgaatctcacactatagctcttcacagtcactctgcaaatttcaaaaacaatgaaagataacatccaaactattaccctttttggtgtacacactgtctccagatttcaaggcttttgcagtagggaccagttatttaattatggtctggcctttactagtcaaaggtatgttcttgggcttcatatgttcttggacttgccaccaccgtcacccctcactgcccctgtacctcataatataacagtggcttaatataacagaggcagggctcaccacattttatatcagtgttggcttatttatggcttgagaattgcttgagatgctgaaactggccccatatgggattccaggagtagcagcagcccctccccttggggcttccgggaactacagataacttttttaatgaatcaaaataccaaagaactaaccctcccaacagttgttatccattgctcaactccctgtagagagcagcctgtggaatttgcagcattgtgatcgtgtgcaaagggcagcaccaggccctggtggtgataacaaggaggcatatttacccaacacttctcccccagggagactgtttttcctccactgcaatactgtggccctcttggctcaccctgcctggtccctgacatggctgtggaagcagatggatggaatcagagaacccgcccagacagaaggaccaaggcaccgagggagaagataatataatgtggcccttcatctcctggtgtgttcctaaagtatggatgattgccattctcaaagaatttcatgatcctgatttaaagaaacttgccaacattccaggaacccagaaaacagacagcagtcctccacagagaggcagaaaaagagacaggacgatttaaagtatcaggagcagggcctcacgggagtgagttcagattgtgcatggcaaagtcaaaacagatgatgctttagagcagtagtttccaaaccctatcacccaaagaacttgctaaagcaccgattgctggtccccaaaacagagcacctgcctcagtaactctgggtctatgtctatcaaattctcaggtgatactggtccaagagccacgccttagggggaaatggcattaatgccaactccagtaaattaggcaggataccaggaagaacttcccactgccaaggttaaacatgagaataagatcaggttactaaggacagttgtggaaatctcctgagctagagactcacgtttctgaaacggatctgaatctgttctgcttagctacaaggtaattttatctaccatggactataatcagtttcaatacaagattatggagtatctccaggattccaagcactctgctgggcactgttactggcaacaggtagcacttgcaaattgaggactggttggtttggttgtatccttgttatagatggggaaactgaggctcagagattcctgcaaggtctcacagctggcgtgaggcagagacaggactcaaactcacatctgcaatctgatcttgtcccttctagatatgaggtagggagcagaggtgcatagaacaatattttcctaaattgtacacttgagacagtgtcctacaagatataagataaaaaagaagtgattcaaaatgtcaaatggccaaataagtttgaagaaaacaaatgcaactgaagaatctgctagacttctcaggtattttaatatacttaagtgtgtagtgcatctctaagaggaggctatgtagtatttcttaaatttgaccagataatcttttatttaaaaacatctatttaaatttcaagtgacattccagttgcaaggaacacagtctggaaacatctggcatggatattaataaggcaaagaatttacacccctagcccgtgttctacttcacatacactcacacatttgggatgaatgcggagtgaatatcaggtgtgattcaaatcagattggaaaagaggattttccaagattctgcagcctttgcccagggctgaggctttaatggagagcgccaggagccccgagcagggtccagacaaagccaggtgccacagggcttggtgggcatcccctgcagcccacaatccctccagggcaggagccagaggcgtctggtcgtcatctgtgcacccccgcaggcttcctgatgtgagagacgattcccaccagaactgttagtcattccagtttctctcaatcaattattcacactcctgtttgcttgctttgagagagaggaggggggaaaacacagaaaaagccacagggcatgataaaatacaagggagaggggagaaaagaaagctggggacttttctgggctgagtatagggtagaccactagatgtgctttctaataggtcacctgcatttgtcctcttggacaaagcacacaggctgaggaggtctccttctttccctgaagcccagagaagaggaagcaggaagagggttaagagcacagccaattgcaggagtcagaaagacgcattccaggctccagcatgagcccttcatggttgtttgccttgcctgcttggataatatttgaccagctgaggggtgcagtgtagacacaaaaatcacagcccctgctgctgctgccttcaggctgtcatgcagcctactgaagtctcagtttctgccatggtaaaatgaggatggctgttcaagctcgcccggagggattcaagtgagatccaaatatgaggtccccgtggcagggacctcaaacctccaccagcctttcaccctaagcatgcacagtcaattttagtgaaaggatcaagatttttaaattgtcatgtgtagtattttgcaaatggctgctacatcatcagctcgttaataacagagagtactggcactggcatggtctgcaataattgttatcgctatcaaaatgatcagcaatgatacgctgccctttgtattcaaagacaatgctactaacacagtataacaagtgcttattttgcattgcacaattatatattgtctgagctaccaatatatttgagagagtatttgcagtatgtgtatgtgagtgcatatatatgtgtgggtgtgcatgtgtatatttatatatacatatataaacacacacaagtatatgcatacacaaatgtagttatatattatgttcatgaacttttttgcgtgtctatgtcttagtgtcttatccttatataggaatacaagttcttatgggcaacgattttcctttgtacttcttctgtatcatctttagttcaaagcagggtgcatcctttgtaggaaacccttaatacattcctgttggcagtcaggtttatcccagcagtggggaaaggctcatattgatccctccatccatgctccctctctctgaagcccactcatggcatgtgttgtgagatggccaagccaccaagcaaaccatacagcccacttgaaaaaagaccccctcgagaaaagaccccctcactgctgagttaattagctggctggctgcacacaccaggattggacatggatatttcaaagcatcttcaccctcagacttaaatgctacctaaagcattccctgggattctatttttcaaaatttattttttccaaagtaaaagtaataaatgctcattaaagaaaattaagaaaaaatgtaaataaatagaaaacaataaataaaccacacctcatcccattttccaagcacaactactgttagcattttgatggttctctttccagtttttattttattcattgtatcatgctttctaattgtctcatgctttttcactgaatgttatcacacaagaatcagttacaagattggcctttataaactaagttttcaatgactacataaatataccaaatctacctaaccattctcctataaatgagtgtatatatcaattccaatttttgatagactaaataaatgctgaaatgtgtatcttggtgattattacccttgaaacaaattagaattgattctttaaaaaattgtcaccagttcaaaggatttgactattttcaagtttcttcctaaatatttacacattgttttgcaggagtgttggaccagttagaattcccaacagccatgcttcaatgcacacagagccagtttcacatggaactcctgggacgtatttctgaacaactgtttataatgcttttcaactctttcaaagtccttgctttacccatccctatgcaggtgcacatggcctgttacaaacctctgcctccagaatatggacagtgagacacagaggggttgcctgctctcactaaatctccagctttgggactcactttcagtgcaagcacacagatgaaggttctcaagagccctcctgattcattccctcccacaggccaggaacctgtggcacaccctaaagagaattacactgttgtgtatcctccaggaactatacgaggtttagtgtggtggttcttagcaacagaacaaatctacagcactttcacttgttttcaagtaaccagattagcaccagtcgctaattttacatcttgccttcatacactcttgactacactttatttcccagtaagctagtagaaatgataggagcacatgacaccaagtgtttccacttccttcgccactcacctcctcctccccaccggctctatgggggaattatggaattgtgctggatagtggccatgcaggagacactgctcacgctttgttgtaaccatagtcttaaggaaaggagactggacaacaccaattaactttttttgggtgctctcctggaccagatgccaacagagcttttgcacatatgatcagctcatcaggcactgttggcttccttttctctttcccgcagaggctgggatggttctgagcactgagttaattacatgatgctgcagtacggtgggctccatcctctctgccctgtgtatgcacacacacctttaaacacagataagcatacacacacacacacacacacacacacacacacacacacacacacactggccaggcgacttggctgcagaagtggacagatgagcataaggttatcctaccatatatcaggcccaagagataactatattccgatgggagaatcagttagtttcactgacatatacaagtgataacaccacaagagtcaaacatgcctacactccattgtccaaaattacccatgggacgcttggggcagagaaaagagaccaactacctagccaagctaagcagagacacattctccaaagtcttttttccctaaggacttggggtggcaggacatgagctatgatgtatggctggggtcacagggaggtagatgtgtctcatctgtttccattttccaatatccaaggctgacaacacactaaataagcctacacagctctgaagtttttctcagtttgatgaacagctggagaacaggagttccagagtcactgttgctctgtgggatcggggtcccgtctgtagctcaagggtagggcagaggctggtaccaggcatctggaaaagatgaaaccttagcagacttagaccatggtgcacaagatatgcccataagcctccttattcccctcctcctttctgtttacagtaaatatgtattacagttctgaaatacagtaaatatgtattacaaaatgtattaagagcctcaatatctatggagcagaactaacaaggccacagttgaagtccaaatcctgggtcaaccaaacaactttacttttgttccctggccacggatgttacacccggccccaggcacctgactcagcaagctgtatgatggcacgtgtcttagacagcaaggggaatgatcaggacaggatgcctcacctatgtccctgaaagaacaacctcaaagccccatcttaccaagtatcactttttatccaaaggtgagcatgcaagtgcatgcgcgcacacacacgcgtgcgcatgcacacatggatgcacacacacacacacattctcagtgacaagtcctcctgtggccaaccttgcccctcactaataatttgcacaaattaaaagataaagcagcttagggtcattcaataaatcataagcacaaatcaaaatctatccactcaattaaatctgaacctagctggaatcacatcgtttttgaacgctgaagtggctaatttccgaaggatgtaagaagatcattcaacacatggttattcaatatcagccccttttctctgtgatttttaaacttaattagcatttagtaaagatggcatgatgttccatagagcagcgatctttgagggattacctccagctcagaaggggggaatataaaaccaatcagtccattgatagaggggccccgtgagctgcccagcattgaaacaagcaccagaggtgggaaatggaagaaaaagaatgagtttgaaaggaatcctgccagccctgtgtccccagagtcatccccaccagtcctggcccacagtggtccaagaacaacaaagacagcctctgcagggagaacaccgggctgtgtttgcatctctgaccactcccccagcagtctggatcctgccaaatgaccgctggtcaaacacgggcgggctccagctggtctcattcctgttatgactgcacttgggttcattaacacccagccctcccctgtgggcatgcaaggcaggaagccttctcactggcttgttttgcagcctagctttttctttctcagaagtggggcaggtggtactacattcgagtaaaatcatgcttagtggggaagggaacaggctgcccaggcttggggtggacacctctggggccacatgctcagaggctctctggctgcctctctcgttagtcagcctttcctggcatacccccggtacgttaaaccgtcgtctgaaatacccagcattctgccgtggaaagaaaacattgagctcggaaaacaggtgggatgaggatattccagggacctggctcgagagcctcagcagggatcatgttccccagggttgtccccaaagacgggacacttttgtgcacaagctgcagagcatcagaaaatcttggggactgcaaagcacatcacatgtcttataggccagagcttctcaaattgttttgaagggccattctgtaaaatttcccatctactgtagatggatacttttgtcaaatactagaagaacaaattactagaagagtgaaacttgaagctgcaaaatacaaatgcattgagtatgtgctgggatgttgcatcaatatcaagttgctgtatacatttctaaatgctcactctcaatgtctgtacctatctcagcacaggccactaacaactcgttcacagagtatatgctgaattgcgctggtctagatccttgccactcaatgtgtggttcaaggaccaagatcatcatcattacctgtgaacttgcaagaaatgcagaatctcaggctccacctcacacctattgaataagaatctgcctttgcataaaattcccaggcaatttgtatgcatgtgaaagtttgagatgtgctagaatagaccaggcttctgagctaatagattataaatgttttctttccactcaaccttcacgatgtctttgagtaaaggagatactcaacgttgaagtgccttaactaagttggagagcagagggggatgtaaaaattggcagggtctgcaggctgaaatgttttatgggagttgagtaactggcaagaatgaagaagaaaagctgagaaaactgaatagcccatctgtcgccaggtaactctatggttcagaagccaccagagaattacggcactcacttgccagatccaaaggaagcccaggagagtgagcacaaagggtgagagacatttatgaatccagtattgggaaatgggcattgcaccaggatgaagcagagagcccaaggtcagggtgctggaggagacaacttgattctgtaatggagattgtgggcggcccacgcagagacagcaggatgtttatttagatcttgtctacttagctggttgactggctgcaagtttgattatcattcaccaggtctctatgccctcagccggaaccatgttcctaatctgcttggccattaagggctctctgaaccctgctctgtctccagcatagagccagagaggctggaagctccccggggtctctttctgcacctccctcccgcggcatgtctctgcttctgtctgggactgcaggccagcttcaatcaattcccaccgaccagcagcccagatcttaattaaaacattcaacctgcacacaagtgaggagagtagtcacagccccctcagtccagctgaaaggaaatcacaaggaatatgtacagattcataagagacttctatctcagggtgcaggtggggtacagccaatccctggttcccttttcggagcactcccatacacctgtcctccctattcctgtctcacctgcactgtgactgtcacttcgatccgacttccataggagttctctccccttctgccccaaatcactaaaacacagagctggggagaccctggaaactgaggacccccaatgttaagtatcttgcccaaagtcacccagccacattgtgtccctgcctgagagtaacaagaaaatgcatgatttgtaagtcaatcattcatattagtcccagtcaccagatattccaccacgatgataattttgtacttattattgtattgtaatagtctaccctaactaacaattttggttcagaaaaaaaaaggtctccttattaatgtcttttctgtgtcctgaccatgtatttttagcaatccaactaaggggttccagctgttaaactctttgaaggataagtacgtatgaagagtttcacccaattacttctcccaggggtcctaagaggctttggggccttaagttgggactacattggcttcaagggtggataagacagaaactgtctcaacctttgggttgtagaattcagggtgggatgagctcaagcctggggctcatgccagccctcccttccaattctacaagattctaggaagcattagccttcattattctattcctcaaagcagggcttctttctggcaagtcccataacatgagaggagcctgaatcccacaagccatgactggcagctcagagcagaggcgtgtccttcacacagctctggctggaagagacaacattctcaaaagaaaagggccccactgatgaccagtgatgatgagctttttttcatatgtttgttggatgcataaatgttttcttttgagaagtatctgttcatatcctttgcccactttttgattgggttgttttttttcttgtaaatctgtgtaagttcttgtagattctggatactagccctttgtcagatggatagattgcaaatattttctcccattctgtaggttcctgttcactctgatgatagtttcctttgctgtgcagaagctctttggtttaatcagatcctatttgttgtctattttggcttttgttgccattgcttttggtgttttagtcatgaagtctttgcccatgccaatgtcctgaatggtattgcctaggttttcttctagggttttcatggttttaggtcttacatttaagtcttgaatccatcttgagttaatttttgtataaggtgtaaggaagggatctagtttcagctttctgcatatggctagccagttttcccaacaccatttattaaatggggaatcctttccctattgcttgtttttgtcaggtttgtcaaagatcagatggttgtagatgtgtggaattgtttctgaggcttctgttctgttccattggtctagatatctgttttggtactggtacgatgctgtttttgttactatagccttgtagtatagtttgaagtcaggtagtgtgatgcctccagctttgttctttctgcttaggattgtcttggctatgtgggctcttttttgattccataagaaatttgaagtagttttttttccaattctgtgaagaaagtcaatggcagcctgatcaggatagcattaaatctataacttactttgggcagtaagataccatctcacaccagttagattggtgataattaaaaagtcaggacacaacagatgccagagaggatgtggagaaataggaatgcttttacactgttggtgggagtgtaaattagttcaaccattgtgaaagacagtgtggagattcctcaaggttctagaactagaaataccatttgacccagcaatcccatcactgggtatatacccaaagtattataaataattctactataaagacacatgcatatgtatgtttactgtggcactgtccacaatagcaaagacttggaactaacccaaatgcccatcaatgatagactggacaaagaaaatgtggcccatacataccatggaatactatgcagccataaaaaaggatgagttcctatccattgcagggacatggatgatgctggaaaccatcattctcagcaaactaacacaggaacagaaaaccaaacactgcacgttctcactcctaagtgggagttgaacaatgagaacacatggacacagggagggtaacatcacacactggggcctgtcggggggtcgggggctagggaagggatagcgttaggggaaaacctaatgtagatgaccggttgatgagtgcagcaaaccaccatggcacatgtatacctatgtaacaaacctgcacgttctgcatatataccccagaacttaaagtataaaaaataaaaaataataacaataaaaaagaaaaggcccccactgaaaacacagccatcattaacttctctgtctggcaaagcaagccccaggatgtgccacatcatggcccccgcttcttctctgccccatgagtcccagcccccttctgcccaccaaccactctccttcttgtttcctgagacacacccagccccaccctgcctttcagcaggcacttgcactccttgaaagtcccaaggagcttgtacttcctcacattggttgggcatgagctgggctaaggcctttctgttctccttttgtgcttctaatgttgaaaaatgatgtctgtaataagacagtaaattctttgctggtgactcaaaagccggtaagcagagaaggcagtggatgggaaggaacgcagagggcaaactctagttacttctccccataccacagcatcacagtcttagggagtttcccttttgccccatccctttcgagtaaagcaaagggatgatggaatctagtttctgcttcccctcaatgccagttagcattagtggaaaggagagtctgtgcccagccaggaggacggaagggtaccagcagctggcaggagcaggtatgtgcacgtgtgtgcatgagtgtgtgtggccatgctgcaaggtggcatcaggtaggtgacatgggaaatgcaatgcccagcatcagtctcagggcaggagaactggggctaggggaatccacttcccttcccttactcgatctcccccatagtgactggcaaagcatgttgaagaagaagtagaaactccttgcatttgtcttctgttactggggacagcttgtgctgatatgttctaattacttctctggttcacccatgtgaactaatgggcaacctcaagggatagtgcaggatcctggggctagccaaagtaaagcacccttacaaccctttagcctgagggagcaaagaatggggatgtttattggaagctgaaaggagaatcgtgtagggcagatgactttgagaagtgatcttaggtaaaggatgcagccaaccccaggctacccagcaggggtggacagtgggttaggggggcagtgctaaaagtggggaaccagtgtgaattaatctccaacctctatcctttccatcccaccagtctcctgccggggtcctcactgtcctgttcatccagtagtcagaggccagggaggccaccgaggcagactccacaatctttggagggcacaaggctctggagcatgaataaaagattcctggaatggctgggcccggtggctcacgcttgtaatcccagcactttgggaggctgaggcaggtggatcacctgaggtcaggagtttaagaccagcctggccaacatggtgaaaccccatctctactaaaaatatgaagcattagccaggcacggtggcaggtacctgtaatgcaagctacttgggaggctgaggcaggagaatcactcgaccctgggaggcagaggttgcagtgagctgagatcacaccattgcactccagcctgggcaacaagagtgaaacttggtctcaaaaaaaaaaaagaaaagattcctggaagaagcacacattggtgtgcatgggaattactcattgatatttctgtcctactagaacataagttcctggagggcagcatctatgtgccaagggcatgatgggccctcgataaatatttattacattaacaagagtatatatgaagaaatgaaggaatggaagggcatcatggagggaacaaagctaactaaccttcttgtagtctgtaaatgtgcacctgctatcaggaggccccagcctgtctttcagactcactctctgaaaagtgcggacactgtttctcccaatctgtcctcacaatctttccagggctgccactccctgagtttcccaggtctcctgggttcacagtcatgatactccaagctggcaggaggctcacccctggcaggtgatgctccaggcaggtagccgagtgccccagaggctctggcagtcactgtctggcctcagtgctcttctacagtgaggtgtggcgcagagctgagcatcgcgcattgctgtatgccctgtttcacagttactgtggcaacagccaggcttcagcctcgcctaggttgtcctggggaggatgggccgctgttggaggctacagcaatcctgtgagccacagccatcctggtcattgtgcaggtccaggcatctcaaaccagggagtagacacagacactggagtcctgctgagccccaggctggccaggagacaaaacaggcgtgatcattcacaaaacccaggagccctaggagatgccgcctccctgtgtccatctgagcacccaggccctgcagcagaggacctcctccggttggcacgaaggcgcttcacagcttcctctgcagccacgccttaccccatcccaccctaccccatgccccagccaaataaaactattacagttttattataccaattgtcagtttcctcctccgaattttctcatgctgttcctcatccttttcgctggaaatgttcacttatcctccaaggcctagctcatgcttaccttctctatcagcaacattgacccccaacacccccccccaccaccaccaccactgaccccagccccacccacccaagaagactctcccactccccattctaggctcctacagagggtgataaatcccactcccctgccagactgtgtctctcatctgattatcagcccagcacctaaggcagtgaatgggtaccttgatcatggtaccctcaagaacccatgatccagagaggctgtattggctttaacctgggtgtcaaactaaggagtcaagagcaaacagccccacatatgaacctggatttgggcatggctgattatcatgggagcacccttcctcccaacaagctcatcactcaagtcctacttttgttagctaaacattcattcattcattcatctgagaaatatttagtaagcatgacactacacaacactgtgctaagcactgagaatgcagagtgcagcaagacatagtcccggctctctagaaactcctaggctaggaggagagacaaaagagtaagtagacatggcaagggaagtggagaggatggtgggaatccacagaagaggcccctgattccatgtaagagagaaactggacatttagaggcttgaagttcagcctggatgaaactagcagagcggggcggcaccaggacactaagccatcttcagaccatggcagcagagcccaggcttgactcagaagcggggctgtgtaacaatccaggcttttctgccaacttacgacaagacttattagagattccaggcacagtggtattgagacacagaccactaatttgcaccccaccctctttttttttttttttttcgtattaactggcatctctgcctgaccttccccaatcctctgacagcctgggagtttgcctggctagcagccatccagatttctttttttctccaagccctggccaagacccaggatacatgggagagggggaagggaacagtttgtgctcatgcaaagcttgctcttgcatacagcccctgggccgggatggagccgagtttcctctgaagcggggcccagccagtagagctgcctctgtcctaccccctcgagacacccaagccgatttggtgcagatggcaccagcagatgccagtccctaggagggtccctcctccctagctaatgaggggagcaggtgaagggaccagagaatgtgatcaggagtgagaagtgaaacaaacactagattaagagttaggaacctgggttctagtcccagctctgccacaaataggctatatgactttgggcaagtcacttcacctctctgaccctaggtgtccctgttgtctgagtctgtgattctagctgtcagaagtgcaaatactgctttaaaagaaaggaaaactgggttttcacttctgctctgttgttaacctactgtgtgatgttgggtaaattccttcacctctctgggctaagattagccatcttttagaagtcacatcgcacgcaacatgcaattaaaactgagttaatgtgaggccagggccatgaatgacccaggaagaaatcatgagaatctatgaagaacctttccccactttttcccactgtccttgccctgggattctagtcatgaggaagctgctggtccacccactgcatgtgcagtcctgctctgagctcctgcccttcctcccgcactaaaaaaatctctctgcttcgccagaattctctgaggccatctgtggctctgatccaccagtcaggtgagccgtgggaccagccctggggattctcagccttcagggatcctgggcctcatcacatgcagatgtagtcctgcctttccggggcaggtgtggctgcacactccagcgaaagtgaagctgcatctctctgcagccttacagcaaatgggtagccaccacagctgctgataaacagctaggggagccattggccaaataacccacttttcacacctggaaataatgggggaaacactcaattaggcattcaggtgtaggtctggactggagtggaagtcacagcctgccctccaggctcctagaaatcactggtttgaggctgttgcaggatgacaggaccatgggttttatgggggctagttggcatggctgaggacaaggggctggctggtgaccattcaggcagaaaggaagatgaggagtggggacaagatgaataagcactttctttagagtctgaggccctgtgagaggaagaaatcaatggaaaccttgggagggaccccagagagagtcctgctgagagagggtgtcggccagataaatttgatgatgcagcactgagtgggggcacaaagtcctatttgaagtattgcaggcaggctggcacgtgcgtcccacctgtgcatctcatgtctggccatgtggcccctgacatgctgctgggcagaaccagggggaagcagcagccagttaaaccctggcacccatgcaggcagcctctgataggcaaacagcctggaagctgggagcctcaattagcctcttggagagaggggagagtattacttgattttctttgccgcccagaaaaagcaagaagtccagatgcaagtgcaatccatgaccacttgctctagaaggaatgaccaggatccccatggccgggaaacaaatgatgaagccagttagcagcctgattccaaattagagtttctcccattatacctatgcctgtacacatgttcaagacacagaaagctttcactgtttgggggtattttgttttctcacaaaatatgggcaactggtatcccaagagctgccatagtttggtgagatataaatttctggtcctttaagcctcactggagatagacagtgatgttgcctggggacttcctgggacacacagctgaacaaaagtaggggtaaggcaaatgtaccctagagatgaggagctgtggtcaaagtgatcacatcaagagaaagccttcagccagccccctgggatatccccacaatggatgggcagaaaggactctggagactcagtacagatactgaagagtatgccatgctttgaaaattggggagttcataaagggaatggggagagctgcaggttccctaggtatctatggaagtttcggaaagagatgaagaatagccaacacatatgtagcactcatataaattaactctaattttcacaacagcactgtaagataagcactatttttatccacacttgatagataaggaagctaagccacagagaggttaagtagcatgtccaaggtcgaacaactgattagtggcagggctggacttgggttttgggttttttattttttttgtttgtttttgagacagtcaacccctatcaccaagtatggagtgcagtggcacaatctcagtttgctacaacctccgcctcccaggttcaagcaattctcatgcctcagcctcctgagtagctgggattacaggtgtgtgcaaccatggccgactaattttttgtatttttggtagaggacggggcttcaccatgagatgaggctggtttcaaactcttggcctcaagtgatccacctgcctcagtctcccagtgtgctgggattacaggtgtgagccaccgcgcctggccagcagggccagactttgaacctcaggaggcttctcccaaagcctgtgcactcttaaccacggtgcagtgcaccctctccagagtgaagcaggatgctcgtttctttagggaaagaccctgccttggtgtgggaaatagagcctccaggggcggccctgccccacacctgcctggggcctagggaaatcctgccccaagatccagacccagacacctgccactctgacagctggcacagggatgggggctggggacatcacaccacccgcattctctgcagggatacccagccatccattttaggctaaaagccttctccgcatctcagccttccccaaaattttacaaatactagaagataaaagcgcaggaaccagcatgaatgaagttggtttttaagagacagtgtttaacatcaagatccttctgatgtgagtaatttggattctgatgcaattctggattgtttgttgaattatgcatcagcagcttctgttgctgtaaaaagcaccaccgtcactcgagctaatctgaaacctgcagcaatgaagacagttgggttcacagtttggatactgagatgcgtctttgatgatagtgaaccagcagaaggagagaaacagacacaagggcaagtggagagcaggtagtaggaagaattgggggaatgaggtaggattaggtgctttatttaccacacactcatgagagccccatgctgggagaaagaaaagacccaaagaggtgagcagatatcagcttcccccaaatccaggaaattccacaggatacagaaagacaagaacagagagaaccagggattcattctggcaaaggatgaagcagctcctagactgtcaaatgcccactgtctctaccacctgaaatatgatgctctccttcaagctcttgacctatgctgggggccttcctactgggccaaaggccatcatggtcatcattattaattattttctcagtgttttaatatgtatttcaggttgatatccttatttaaaagcaatagctaaggacagtatgcctatttgacgaagggcacaggggagaaaggtgatatacctaaagtcacacagctgcttagcaaccggaaggaaattggaattccagtctcctgactgccagtcaccttctcttccatcaccccaggctttgccatctcactatggaggctcccaggatctctgacaacccatcagacccactgcttaggctgggaatgccaagtcccatgcctggagcagtagaaagcaaaggcaccaaagccccaagctaagccacctagtccaaagccacgctgtgcctctagcatggtgtgtccctgagcaagttatggaacccttggtgtctcagtttccttatctgccatagacgcctgataatagttcttgcttcatggaatgagatgatccatttgaaacctttggatcaatgctaagcagaaaataaatataacctgccattttcattattgatattctcctgtgaaactgttgtgacttcagaggactgatcccaaagcctgccaggaagaccctgctgagtgtcccgctctcctgaatagcccatgtcctcactatcacaggttctattcgtgtcgcaacaaggaaccacacatccaaggcagccaagccaggagggccctgggtgtgcgggagtcagctctgtggagatgccgtccatgcccggtctgacgggaaccccagctctgcgtttctccttttcatgaagccagtgagccaaaaccaccctcctgggctggcccagtttaagagcctgggctccagggacgcagggaggcccctcagcccaattataaatcaatctagcagcactcactgaggccattgccataaatggctctaaaagctcagcctctttcggcccaataggctcagggctccaggattaatgagcatcagctgccggcaggctggtggggacagatgccgacctaatgagcacagtggcccagccctcgccagctcgaggtggacagggctgatgagcaggtgtcattgtcatgatgcccctttgccaagtgtcactttgaaagggagggctgttgtcatcaagtggcatcttattaccccacctcaggacacccacaggagattctaaaggctgtccacaaagatggcctttgtggctgccacctccactcctcagctggccctggcaccaggtttttctcaaggcctctcaaccacagggctggataagggttttagaatcctgggcatcccctcccatcccatgccatctgattggtgctgcattaaagtacagaggtccctgctagaatttccctcagtcacgtctctattacacccacgggcttcaagtttgcctggagtatttacacacagttctgcagattcaaatggattcaaatgggcgcaagggctcagcatcacactggtcaccaaagggacacaacccagtccctgcaagacatatcagcttgtatgtcagtcaaagacacaggccttagagggactgatcataagcataaaacatagcaacaacaaaaatagtcatgatcacttcttcagcatttattttgtgccaagcactgttccacgctctttatatgtgctggcttatttagtaaatgtgaatgaaagactctgaataataagagtcacgttatattaaggcagtcaatgcaggtgaaacaaaaaaaggaaagatcacttcggctgactggagaaatcaagagaggcttcatgggggaggcgggaccacactggtcctagtgcagtctgggaagagtgttccagaagcagaagcaggcacacctgggcagggctacagtgagtttgctgaaggtcacacatctgtgctttggagggcagagctgcagggccacaggtatattcaatgtagtgggttctggcatctgaaaatgttgttaggatgaaatttcaaaatcaggttttattcctgatgaaagtagactgctcttaactggggcttcactgcttcttttccatttctgtttggagtgtgatttttttaaggtaagatgtacacgcaatgaaatgtgcagatcttcagtgcacactttgatgagtttttgacaaatgccttcacctgtgtaactaacaatccaatcgagatctagaatactttcatgggcatgaaaggggaggaatgtgacctttgtgatcagatggtcccatacctacatcttctgggcatttgtaagttggaataaatcaaaataatcaacttcctcccttaccccacgccagtccacctcctacccccggagaaaaaataaaataaaattcatccacatctaaacagacaaatgcctacctagtctgtctgtgtatttgttacctttgtgccccagaaccaagcttcataccaggcacagagtgaatgatccatacgtgtttcttaaaaaaaggaattaacatcctcagattaaggtctcccaggaagtaaaggactccactttctctaagttcccatgtgacactgacaattatattttcctgtcctctctgttgagattaggaaggagtccctaggaggatgcagaagagtatccttttgtcctgtctcctacctgtcacccagactcttgtgttctctacagccagtccatcttaggcctcaaattccatatgtttgacaaaatcaagcaggtagttcaaggtgctcgtctctcctcccagctattcagcagacaaaatctgtgacataatgtaccccagcctcagacacgctcacccttctttcccaggccctgtgtgaatgggccaggccactccttgatagttttcaggcaaaacacatgagaacactcccaggaaagagaagcctccaggggtaccatccgtatgcataccacgcatttacttcctagcctcaccagcgttttgggtgtggccacagctactccccaaacctttcatcttgcaagtccctagatgtcctcctcgggaaagctccctgcgcacagcttgtgggagactgcaggctcataaacagcataagccagcattccaatcagattatttctcacttgcaatattgcacaaagagaaaaaaataatgctgaacattctgttcgtggaagaaaaaatagcaggagaaaactgtcacattgtttggtctattttcaatttcattcccgagccctgcaaatagctatctgtgcaagcaggccagaagaggactccagcgacctgacatgcacgatctcagatcaggtctctagggcctgtgaaaaagggagagacctttggctggcacatatctacacatgtgataaaattgcacaagactaaatacacactcgccaatgcaaaaaactggtgaaatctgaatggataagcttggtgggttgtaccagtcaattttccatttgtgatattgtactatagttatgcaaaatgatgccacgtggaggggagaactgagtgaagggtacaggaacccctctgtacaatttattgcaattgcatgcaaattcacgattatctcaaaaggcaaagttaaaaaaatgcgcttccagtgtctgatttaatgggactaggttgcagcctgagcatcagagttttaaaagctccctaggtggttctaatgtgaagcccaggctgagaacctttgctcatgaaggttgggaaggtgagacacacacatgaaatccagaaacaatcagcatgtgatacagtaccaaaagcttcatgaatacttgtggagcaaatcagtgaactgctgaacagacgcataaggttagaggaagtccggtaggatgagggaagacttcatggtgaagtggaacttaatcaggacggggcataagtggagaattcagaggacgggaaagggccctctaagccaataaagaagggctcagagattgtgtggccatactggggaggaggggaagaactgaacttggggacagctgaggagtgaagatggataaaacttttcataataaactggctctatccctgtgcttagacgagtggatctttcaaacacctgaaccagctctaagtccctgcaaattgccaagagcaattttcagcaaaaagccaattccccagaaggcacttggcatctctcagataagcaaaagagggggaggctggagaggcttcagaatatagtatcgatgggtataaaagtaagcagtccttgtcatggttcatgtcactttgcctgactgcacttcagctggccttagattccccagtcgagagcccagccaggtgctagaaaataccagaaatgacccgggaaagggtaaaatggaaatctcaagcctacataccaaagcgaatgcacttgactcagcaggtccctagagtaatcatgcaacacctctttattcttattttatacacaagtctaataagcttgagtatctgtttccaagcccgtagcaaattaaaaagaacaaattaagtggcagcaggagagctgcatcagacaggatcagtgacaacagtgagaagtgacaggtgccagacaccctgacggtaggcggggagacagaaagctataaaaagtaacttggggcactcacctaacatgaggaagccaccctagcgaggcacaggggctccattgtaaaggtggagaaagagctttaagatactcaagtccaagttctaaatgccttggagaacatctctttgccttttcctgttattaattagtccaacatacacacaggggagaggggcagtgtgctgctgcaggctgccactatgggaggggcagctggctaatcatcttattgcaggaaataccccctgccaaaaacacagctcccctctcaaagcctgctttctcaccttgtagcactggccactgccatcacagggtatgcagagcaaaggacaggctgctcccgagccgctcagtccatcggatcaatcaggtttaacaaggaggcatccgaggatcaggagaaacacctcctacattattaccacagcaccatcactttgcatgagacaggtctggctgggaacgccacctccagcatggacagaaactgcgtgtccttgacccagttgtttcatttcttgtgctgagcacgcccacccattgacccccaatccagagagctagtgttgaagagctcattaacaaaacacaaaacactcagctgacgcaccgccaccatgcaaatgcgtaataactggatctctcttcccccacagctaacctcaagcatctcttcttggccagctgcattgccttggctctctgtgtggttcagagccagagagggcaggctgggcagccacttccatgccaacatcccaggaggcagtgcttggagcaggaagatgagagaagatgatctctcccactacacagagcccaggtcccggccccagactcagaggccctgacgcctgctatgcctggtccacaaaagcagcagggaagggcatggatgctggcaatgcactgccccctcaggagccagcactcaatcatgttctctctaaagaatgccagtgtcccattttcatccaaatgtgaaagttgaaaaagagaagtcaggcaagggagagaggcttttaagatttcccctactcaggggaggagctggcagcgtgagcctaaaaccaggcaggcaggtaacgggagggggccctaattgctgctaaagatcacggggtaaccctgatgacacctgaaagtcttccgtggatcctcaggcacaaaacataaatcatctccctctcacttcttactgatcgcgtttgcttgctgtgtcagctgaattcccaaattggcctgggtttaaattgggacttttttttcccttcctggcctggcttttcctccactctctctctccaacctcctcccaccccatgggaagtgatgacagaggaatctgcctgcggactccaaaatgcaggtttgtggcttcactttgtggggtgggagggaagaggcagagagcagggaagagggcatttgggggcttacttcggggacaggacctgagggatcaggagggagaaagtggccatctggacccacttgccgacttttggtgtcctgtcctccttccaagtaaaccccttctcagtccccagggcagccaggagagtctgcaacagacatgctccattcagtaggggcgggactcaggaagtgcaacagggaaggtcagagccggataacgggtctgtagttggccctgctgttctggggagcagatattcacctgggctctgtggtgggccaggagacaaggctttctttctttcacttcttttgtttccacgggtccccaagcacctccataacacaggatgggtcagagcccattgaggaattaacccagaggccttgaccctaaatagctccatgagaaggctgaaccttactaaccctccaggaggctgatgtgaggctacacacaatgccaccagctctgatgggcccgcccaacacaactccaggaaatgtcccaagaaagctttccaaagaccccttttcctagactatgggggactccccccagtgacttcatcactcaaaccacaaccaaaacgatatgcagcccccttagcctttgtgaggcagaggagaaggctggtgcgcagcctccaccactgtcaccaaccagccctcacaggcccagagccagggggcagtgggcaggtggcctcccactgggtggcagaacaggatggccacacaaccaacacggcttgctggtgtcacagtgtccctgttacatggacctggcagtgcaccaggtgacatggaggccacacactacagggtagtgattaagaatggactcccaagtaagactgcttgattggcatcctaatgagcaatatgatcatgttatttaactttcccatgttttgtcccctgttaaagggggtgatagtaacagcgccacctcataggggtatagagattgagataattcatgtaaagttcttagaacagtgccaagctggtgtaggttgtgattattattctgatgcctactactactattattatccctgtggcccaggagaccagaaggtatagagggtggaaagacgaagcttcagggggagtactgcacagggtggggtactactgccttcctgtcaccccagtgttcccactggcttccccagggctggtcctccttgttgtgaaggatctgagtctgacgttctactttaaaataacatcaaggggatccattgtttcagcaaaataataagagagggcagctgagggtatgtgtgtgtgtgtatgtgtgtgtgtgtgtgtgtgcatgtatgcatgtgtgtgtgtgttggacacattctcttctgagggatgtatgttttctactccatagctctcagaagcagtttgctgaaacatggtactcccagcttggctgaaatcgggaggcagggcagtggagcctgggccttggtgattaaaagtctgggtttgaaatgggctaccgcaatgccgagttttgggttccttgtacactgatgaggcaggactaggctgtgcctacagctgctcttacttaggaaatcctaggaactgtgattccatacctgctacattggactcaccacgagatgctgagccagccatccccttttctctctgatctcactcttccttggttcaacttccctggtcttcaagaaaaacagtcagaggagcaggggccacaggaaatggagagtcctggttactgccagccttggaaagatgggtgacagctctcggtcctcccaggggaggaggtgtcggcttagcaggcctcctcaatctggagcccaggctgcaaagccagggacgctgggctgagtggatgccccacaggtcccacagcccatcacttgcagagccaggtggtatttctggttttcactacacatacccatgtggcacaaaacatacattgtgaggatgtgcagagagcatctggattccttagacttcaggttccccatcctttagggcagttttaaaaattgtttcgctggaggcctacccaggaaatcttactcacattgaaaaccaggatgaaacccaggaaaacaagtcttccccttgctacctgtaatgcactcagatatttttctttcttactctattccatttaaaagaaggttggccacagcccactacattgacttaaagccatacgatgagtttgtggccccctggcttggaaagcaccatttgagcagcagggcagtgacaatgactcaatgtggcctcagtgcaggcagaaatcccattttgcaaagggacagactgcctgacaaagtcagagtccaagtgtctccaggcttacactgcagggttaaaagaacttttcagatccatgaacctcttcacagagaaggatttctgcatccttccaatgactaattctcagcccagacagaagttggctcatttgaaagggatagcatgccctcctgccacacaatggtctgagtattttttccgtggcccataaatgaagctgacattagataagtcactcacgcacttcaagaacttcttcaaaattggagtcagttactcagctactccaattgtggcttatttcctcacttctgagatttttaggaattgagtaaactagagcgcgttctaactcacctgttgttcacctttaactctcccatctttggatgctatgggaaacccaggagcctcctgaccacatgaatgaaaagaatagggcttctcctttggcctcctagcttcagagcatctgctccctcctagccaagtatcacttacttaggcatatctgatttttatcatgtctcaaatttataaaaccaaaaaaaaagaaaagaaaaggtccagggtttacctcatccagccttctgtttcacaggttaaaagagcatgacccaggggcatttacgactcacctggaaccacacaggttgttaagagtgagggctagaatttgggtgacctgtctcccaggagccacgcaacctctctgtgaatgaaggtaagaagggccaagttcaaatctcgaatgtccttgtgcttccccaactctgcatttgcagagaaggttgagtgggcaccgagagaatcaaaatagagtaggtgttcattttgaggggaaaactcaactttctaggcctcatttaccccttttctaatgataaggaaaacaagcccaaacgggatttccactttcataagaacccttcatctcccaagtcctcatctgccttatggagtctgggatagaagggcattctagtaatagctacactgatggccctgactgatgcacctgcaaagacagatattgacgctctcatttattctggtagtcctgcctgacagactgccctaaaatgagcaggagctcattatctcagctggccttctccttaagcaaggcggaaatggcccaaccctttctgggacaccccacccctgggactcggaggccctctgaacagcagggatgagatggactgatgtggatcatcatagtagccaaatgaggccctctggtgattttcacagagaggtgtgtggcacccattttctagtgtgagaagtttctagtgtgagaagtgtgtttttgagtccattgatccggcactctggatttcctccagggatgtagatgcatcctacatgcatgcacacatgcacatgcacacaaacatgcacatacaccaacacacaaatacacacatgcacacacacttgcacacacacatgtgcacacaaattggctgctcaggtcctgcatcccagcatgccccctggaaaccaacctactttgttttatttttattcctgggactacgtcaatacatctctcctggtgtggagggtgggcatcagtttgaggggcttgtcctagtcagttgggctaaatggggccaattcttttgctttccagggtggatgcagggctttgttgaattgtgaagaatgttaaatgaaactgtttattcatatcacaatctctgctatgccacagaacatgaacttagaacacacagattttatacatcggaaacaagaaatgtctaccacattagcaaagacttaataaaatttcatagctttctagtgggaacataaattggaacaatacttttggaaaacaatttagtaacagatagccaatctttaatgtgttcataccctctggcctagaaataccgcttctgggactctagccaaaggaaatagtctgaaatacagggatttaaaaaaaaaaagacctttatgcacaataattttcatatcagcattatttataatttaaaaatgagaactaacttaaatataaaacagtaggagagtgggtaagtaaactacaatgtatttgcataatagaatattaagcagatgtttaaaattatatttatgaagagtttacaaaaagtggggaagttagttgagttacaaggttcactgaataggcaggaaaaaatgagacatagagtataatcttatctatggaaaatgattaacataaaacatcgaaaggaaatattaatgatagctgcaggcggtggcattctgggggtgcagtttttacatttcttatagatttctaaatgttttaaataaacaagtatttttcaattcttttttagctttgaacacaaaaacactttatttatttatttatttatttatttatttttgagagagagtctcactctgtcacccaggctggagtgcagtggtgcaatcttggctcactgcaaactctaccacccgggttcaagtgattcttctgcctcagcctcatgagtagctgggactacaggcacgtgccaccacatctggctaatttttttctatttttagtagagatggggtttcgccatgctggccaggctggtctcgaactcctgacctcaagtgatccaccagcctcaaactcccaaagtgctgggattacaagcatgagccactgcacctggctaaaaacacattatttataaaaggaggtccagtcacatctctcccattacctctgcagatgactgcagagaagtgccctctctgcctgcctccctcccgccccccaccccatgtcatcttctctaagaggaatgcgttggatcacatgatctctaaaacccactctgctctcacattctgtgtcttgaaatatcatccccctgtgtttgagactgagaatgggatctcaaaaaggggtccaagcagcgaaactatgctacaagtaaaacactgtaatcatcctaacaagacatggacttggatggtcttctagaagatgcagctgttcttttacagtcttcagagaaaaatgctgacttgatgtccttgggattgaacatctggagccaaacatccaaattaatggggtcgcgggcagctgccctgtgaagccagaaatccaggttagggaggtgggggctcagctctgtgcctccatccaggccctagctggagctgaccttccagggtactgcagtagatggcttggtggcccacacaggcacagcaggacagatcccatgtcctataaccccctatggcagctccagccccgagacgtcttcccttgaccaaactccatgggattctttttgtccgttatgagcatggggcaccttcttacaaatcatctgatggtctcatggtttccagttccatttcctcaaggacattgtctgtcaccccttgaaagtctgtccctccttcgatcatcccagagtggttgagtggttcacaggggaggggaaatgagaatccacacattgaaccagctccccaccctggatgagggggttaattggatttttcactctttcaaggtggaattccatgatttgataattacatgggactgtatctctcccctggactttggccatctttcccaccgttcagagaaaatacgacttgtttctagacctgatattcatccagcatgcaccaggatggatggaagataaaatactgaaatgtttccacactggttggtaaattaccgtcacctgcggatacctcccctgtagtcccaacaggctggctcgtcctccgggagatcccccagtgacctccctaagatgtgtcacctaaagggttaatgcctggcccggcagggggcccccagactcttcacccagcattaagtctttgtgcccttgaagtttaaatattttgaatctcacctctccctgctccctctttggaattgagtcccttgggttgagagaagctgactgtagttgcctgggataaccacgatggctgaaatgtaataaggaggaatttaggcttggatcctcacactctccctcctgcttctaggggtgaaagttgggggatggcaacagttttgggcaaacaggtaggaaagggaaactgtgcccacctccccgtgcccccctcccccagcccatgctattctcagcattcacagttcctctttacagacaggactgagaccctctgagccagcactgtagaatcccagaagcagcacagtgccttccatctgagcttctgaagtacatttcacacatagcaccttcagaaggaacaggaaggagagacacttttcctgacttcgcccatgaggagaaggaagcacagagatgtgaagctgccttgtcactcgcacagctgagacagacccaagcctagccttcccccctccacagggataaccgttagaactgccaactctgtcccaacgggcagtgaggagatctgacaggattacgtcatgtgctctgtaactgggagacacatttatgagctgacaaccagagaggctggtgtcatagaggaaggagggttaccaagtgctgccttttgataataaaggtttcgtctgtctaggctgcctgtctccaagcactctggccaaaaacagacatgcaatcactcccctccccaaggcgctggtggggaagactgctatcgtttatgcttttactcatctccatcaggaggtgtggaaggtgccacaaacctgcctcgactccagctagttccccttctgacggtgcacccacccatctgtccattccccacagcaggctagcatccattctaggtggaaactccactggaagcccaaacctcagacgtgagccccaggagataccagcctgtacagcaagccccagtcctcagtagcatcttttagaaaaagttctggtgctttggccatcatcccgattacgtttgcccatgacatgatccggctgtcatggaataaagaaacatgagggtttcaatgcaaggaatgtttagaaatagagaacgaaaagaatgtgcttgatctcatgttttcactttaatgtattcagagctggcagagaaagggggacatttaacttctaattaatgagttgctccatgtgtccaaacaactctcccatctcttccctcactgcagatgaaagcccaagttctcttggagctgggtgattctctgtgcaggttacatttccccagactctgaacgggtatcttccaccaatcagattgggctctggcacctcgccacctgttcgggcttcaccctggaatccctcatcagcagccacttctgatgcgtaattgacaagaccatagctgatgaagggtatgttacgggcttggctctcaccatcaaatctattttcagttgaaactgctttgaatttactgacaccaaagagcccagaaggtaagaatgggctgtcattgccattgttacgattgtggctgtttttggaaacctgggtcttttcaacttatcacaaggcttcagctaggccctgatttcaacttctgccaccatctgagcacgagccttctgagtccaaattccctgtatatgttgatatcatctcagtaaacattgaggaacaaaggacatgaagaaatgagtgtcagtccgtgtgagggagaagaaaaggcccagaaattctggcatccccagttcaaattccactcttcaccaacttcaccttgcatttccacaccacagacttcccaggagcttggtctctcattcacatcgatatttatgcttggaatgtgaaggatcccaaattctacgtccaatcacatgttcacatccctgaatgctctgaccaccccagacatttctgaaatggcttagctcctgcctgcccctccaaacttgaccaatgccctctgcctcccttcatgaaggtctgtccacagggagcctttctcaggccctcaaaggtgccgagtttgttctccacttcacaacccccaggtaggactgtgtcctcgacttagaacactcttcccctcacctcagctcctcacattctttaggtctcagagcaaacattccagccttccattctgagtagacccccaaaacttgattatcctctatttcaaaaccctacttatttatttcaaagccctgataactgtttattattttatttatttgtttggtttttggcatatctccccctccagacctcagctccatctgttgaatgaatgaatgaagttgctagatgaaatggtatgcctactatgctccaagcatgcttcccatgctgacgatacaacagtcaagaagtcaggtgcattgccctcatggagccgatcaccttgcagacagcgacctgcaggaaactgaaatcataggagacttgggcaaagacgaagggagcaggaaagaggcagaaggaagggaacagcatctcgtgagctgacaacgaaatcctgtataaatatcacacaaaaatctattagtgttaccagcatagagggcaattgctttttaatataataagatcttccttggaggcgattatgaggcagtgataaggatcaggtgacatgttgaggtttggcacagatggattaatttctgtttacatctagttgttggcagcatgggggagttcttcgttttcagggaggaggtgggaaagaggacctctggggaaagcagccaagacacaattcttgtaggtgttattccagagagctcactgcttgctgtggatcccagagtgaactggagagaaaaccagggcctggagcaccggggagggacctccatgcaggacacgctggccaagctttggagggacgacccctctcctttcctcctaaaccttggggtgccatgacagaggtaaactattgctgatgtggagggattagtgactaggaaacaaagatctgaggtctttagaaacaaagtcacttgatagatggggggtggagagagaaggaaggaggaaaatggaaaagaaggcatgctgttcttatacagttcattcccgacactgtctcaagcattaacactctcattactagatactattcttccctgagtgttacacagaggtaaactgaggcctgggcaagtccaggacagacccaatcgtactggaacagagtctgcctccggactcgctgcacaggcacacagcaaagcctggaagcaactctgaagatttcctcgatggggtctttccttccttccctggagcagcccaggggtttgcttcactggctgggcctcctgtctccagtaactcctggagtgaacaccaaagtcccccagcatcaagacaggggcacacaaccaggacaactctgaccctggagccagggggctgtttattccaccatgtggctgctttttccaacatgtgacagatgtcacgattattctgccaccaaagaggcaccctctgccactcccctaaagcaccaaccccaacagacatggcctcaacctaaacccaactcagagcaaaacacaatggaaaacacacctaagcaattcaatggtgccttacaaatggagttactccacggttctggttgcctgaaactgctggtttatgtgtgtggcccaggcaaaatattagcaatgccctcttttactttttaaaactcttccagtttggaaaataaattccagggtcttcctacttgtgatgtacctggaaacccatatattatggaatctacatagagatgatgctattttagagtatatacacccatgaccactatacactcctcactcccaaccccatatcaaccatccagtaaacaaaactctcaacaccccattcacaacatgtagccatcaagctgtgctcacaaaaaaaggtatgcactccgccaccagtcatactcttacactgctagtcactacacaagtctcccaatcatggcagatagagctatctctcttccactattcgggcctagacacgactacacatatctcataatttgggggagcactgggacatatgcacccacttggacatccatccaaatcagccttcagggattttaaatggaaaagccccggttgctgtaatggctacaaccttgtaaggacatgagtccaagttcattaagaagctgggtacagatgaaccctgttgctgttgtgattaataatcataatagacagtcagctggagggcttgccagctgtgccttccaggtcctggttctgggatcccctctcatccaccagtgagtaatggtttggtttattggaaactctcttttcattttttatggcttcaattaagcgatggggagaatccatcatgtaacctttttgctgcactgctaaagacttccggaggggaaaatatttatcaaaccccaaaccatcagaggagagactgcggtaaacctaacaggagactggggtggcagagaggtgaccgagatggtagggaggggagaaaaaaatatccacacagaggtttgatgcttggacaagagccatactctctgtaaaatatctgcttatttcacaaatatcaggctactcctcacctcacatcccataaccacagaaagtactccactgattatgagggtggctaattaatcagcccccagtccccagtcatgtggattcctatagcccaacaggttcaaggtggcaagaagaacagagacactggcaagaggcgtacgtatcatgagaggcataggatgtgctatgagttccatggaaacatggcacccacacgaaaacctcccacacacctcatggaacccgcaatccctatattgataagaatgccaaaggatccatttcctagttgtaactacaaattctttccaacgccaaggacaacaaatcctctcccaaatcaatccattggaatccacaacctcctatccttggccctacacaggcccctaccctttccccgacctctaccaggcagccctgctggtaagcagagccgtctcttattctgcccttcaaagtattcacaccctaatcttggccactggcattaatctttcatttgctatttagacatctgattcctggggcaggattgagagatgtcccttgggagatcaagttggccagaggggaggtccgaagggagttggcggcctgcagagcaacaagggcctgcctggaattaatggggtcatcgccctgctccccatcgcccaaaggaggaggagccacagccagaagacacagatgtctgaagaaatgagattgcaggtctgtctgctttataagacgtgtgtgtgtgcacgggtatgttcacatgtatgtgtgtgcgagaccagggatatggcctctcagcttgtgtcagtgtagctgctgttaggagatttgtatctgctctggtgcagggaacagaggtatcaggagagctgggcaaacagataagactcaaataaaaatgatacacatgtgggccctgggagacggtattgtctccatatgctaactagtaatactacaggttagatagtcagcctgcaaaacataactctaataggagatagatggtggaaatacacttccctttctccctctttctcctcctcactctcagctaacctttatcaacacaaagttccagggactgtgccaagtgttctttattaattattttcatcaatacagcaaacccacaaggtaggactatcagtacctgtattttacaggtgaggaaactgaggtctggataggttaagtaaactgcccaaggttctgcagctagtaagtggtcaaggagaattccagccaaagaagtttcactacagataccaaatttaaccaatgatttaggaagaaatgaacagataagtttgatatagactagagagcactggggaaagaatagattatagctatgctgtctgataaccagctactcgtggttctttaaaattaaattaaatttaagttaggtaaaatttaaaatctagttccttagtcatactagccacatttcaagtgctcagtagtcccatgtggctggtggccaccagaatgactagtgcagatatgaatattgccatttttactgaaaattcactaggtaacactggttagaggataaggctagatgatggcaaatagaaacacttttcaggataaccagctggaggaaggatggcattaacatgtgagttcttcccatctagaaaggacaagaaaagggtgaagagcaaagaggagaacctagggcagcatgacatggatcaattggttgctgttattaacaagtgagacttcaagaaatgccacagaaggaaggggccttggagattagcatattcaacctcttttcatacattacaataaggccagtgacaactggggaggccaatggcccaggtcacatagccagttatgtcgaaggctcttcccatcccacccagcctgtcattctgggtttttcccatcatcctcatccttgatcccttctgagatgtgcacagaaaatatcagagtactcagaggtgatttccaacacgtcttcacactattatgactcctgacaggtaaatcactagctgtattgctgcatcttcctttcttataatggcacagggctgtccaagaatgagacattgaacatttgtaaaatagcagcaattgaaaagataaatggcaaacctggagtttgggaagcagcccagtaggactgtcttcctattcagtctcagtaaatacttcttgaataaaccaatggatgtttggctggatggaagagtggatggatgacacctaacagttcttcaaccactttatggactagtgccccattctcccacccccatactgttcatcacaaactcacagttgcttctctacaagctactaaaatggaaaacatctcagcatgtggaaaaattcaactgcatttcagattctagttaaaaaaaaaaagtgactatatcctgccatgcctatataagtcctgcaacggaatgttgctgaatgccttcttgtctgcactagaaattcacactctcttaagctaagtgtatgcccactctacagggactcccgcttccccctggcctcaaagatcattacctacctctttgcgtgaggccaatccatcctcttgacagctcacttaccacggaccagggctgtgggggagcctctgacagccagagatgaaatggcagaaagggctccttgtctggacattcttgggcatctcctacccgccacattattgtcaccatggccaagtgtgatccctgtgtcatgaggcctgcgcttaggattggggctgcctcctctgcttcttcctagacccttgcttcgtggttgttccctcaaactacatattcagtcacttaaatgacgcaattgttttgagactcagtgaaaaatctcaggatatagactttgtccagtagataaggaatgaggtaatgctttagttcacaaattccttgagggcagagattttatttctgtatcttttaaatctgaattcccagtgtacagaaaaatgccttgcacaaaataaataagcaatacaatagattaatgaatgaatgtatatatgtgtgtgagggagagagagaaggagagagagaaaaagactgaaaaggagagagagagagaaagggggagaggtgggggaggaggggagagggagagacggagggagagagaaggagcaggagatcaacaaatgcccaatctgttactctggtttctgcctgggctgctgttatttcatcccaggaaagctggtttactctttggtccgtgggtctctgttctctttctctctgggccccctatctacctccttagttttgtggggaaattgctttctctgcaaccacctggtcctctaaagactctcttcttaggtcactttggtttatttggacaaaacgcttctaattcattattcctcctgtggaagactttttgagtttatttagaactagcattctgggcactgagtcttaatgaccatccacagacaagcacctagccaaccaaccccagctctttgctgagtccttctagactcttctgcagctctggcacaagcactgcccttcttgttgctgctgtatgttttatcttattttttaaaagaatgattacaccccttttccaggctctaaagtgacctgaactcaggaaaggttctcctctccatccatcaaagttcattcatccctcccccaagtttctccatgatttctactccagtccctcagactccagtggcaaattcacctcaaatttttggagttgtgattgctcctgttttccaccataatatcaggattgaaactttctgctgaacatagttccttggcctcccaaaactttccagatcaagatggatccagcccagcttagctctcaagtcctagaatcccctgctcagacaaagcatatcacatcctaatgctctgtgtggagggatgcctattgttaatgtctttgagaacatgaagcttggctaagaactggttcacaaactcactgcttgaaattcaacaggcatcctgggcaccgcctggagaaaggaagaggaaagcagggagctctgctcagattccatctctaagaccaaggcagaggctttgtagaaatcaatggttttccttccattgcaaagggggcaactggcagtgacgagcagaagggtggagcagggggtgtgggaagaagaacaaagagtaagcaggaggggaagaagtgagaggcagagggtgtaaccatgctcccatcctctacagattcttccccttcacttcctccaggcctggattcactttcttttttaatggctggggccagtgatttgttcccatcgatcactattgatgtttttcaattgtatccgtgacacttttggcaatatgtttgtaaacacagagccttctgggatctcacttcttgtcaccacgtacaggcaccgtctccttgtcactgagtattagctgtcaatcaaagggttgggaagggagctctgtgtccttggtcctgggacttgcttctttttgtctttctgcctggaagtgaacattcctcattcattcccagagggaaaatggaaaccttcctctttaagtgggagaaaattgggcgagaacaaggaaaggtttctacctggggccaggcatcgtgtcctgggcagaggaaaccacagttcttctggggagaaaaatgcagcagagaatcttgtacccaccagtttagcttggatctgggctgcaggagcagagaactgctcccttgaccacaggtagctgagcagcctgcatccaaatttcatcccagataactgggtgaacaactagaaatttcctgggttcacctagacaaggagctttccaacttttttgatcaagacccataagtaagataaataattcagctcatgactgagaatacacatacatgcttaattgaaataaaagttaaaggaaataagaaaatatttaaggagaaacacagccttacaacaagtgatacactctgatagtttctgtccattcttctgtttttcttttttgaattctggtcatgttccattaagttgattcatgactgcctgctgtgacccacagtttgaaaaaatactggactagaccaagggtcagcaaacttttctgtaaaggccagataagaaatattctcagctttgcaggccatatggtctctgtcacaaccactcaacatttccgttgcagcatgacagctgccacagacaatacataaacaaatgaatgtggctgtgttccaacacaactttacttatgtacagtaaaattcaaacttcatgtcactttcatgggctatgacatagccttcttttttttttaaatcattaaatacggaaaaaaaatccttagcttatgggctgtacaaaatcagaggtgatctggatttggcctgggagccagagtttgtcaccctctagaccacaccacatcaaccaacgcttgcagcatgttgccagtccttctcttcaaggcttctggcatctacaaataggtgggagtgaggggatccccaccaacctcttccacacctgcccacgagtcaaggtcaagtccacattgctcctgtgcctctgtattagagcatgaattctaatgtatttaattgatggtctctgttcccctgaactgtgtcctccaagaggatgcacttcttgtatcacacgtttctcactctgccttgaaatgtctctttgcttgtctacccatgggactgtgatccagtagattcctgagctgctggtccaggggacagcaagagagcctctgccctttctaatacttttcttggctcatgcatagaatctatggctgggctcatcctctggtgctccttggtacctagcctcaggctccagcctccacagcctcctcagctaactaaagccacagggctcccacctgccccacaggtgcctctgcacaacaaaaagttctttgcctttaagcacctgaataggaagaagaacactcagttcttttcaaatttacattttaacaatttttttaagtgtagagttaagtggtgttaagaacattcccattgttgtgcaaccatcaccactgatatggtttggctgtgtccccactcaaatctcatcttgaattcccatgttttgtgggagggacccagtgtgaggtaattgcatcatgggggcaagtctttcctctgctgttctcgtgacagtgaatgagtctcacgagatctgatggttttaaaaacaggagtttccctgcatgcactctcttctcttctcttgtctgccaccatgtgagatgtgcctttcaccttccttccaccatgattttgaggtctccccagccatgtggaactgtaagtccaataaacctctttcttttgtaaattgcccagtctcaggtatgtctttatcagcagtgtgaaaatggactaacacaactgccatccatcttcagaactttttcatcttcccaaactaaaactctgtccctgctaaactctatgatcctattcccctgtcccccagctcttggcaactaccattttactttctgtctttatgaatttgactactccaggtactttatgtaggtggaatcatacagcatttgtccttttgtgtctggcttatttcacttaaacctcatgttttcgaggttcatctacattgtagcatgtgtcagaatgtccttctttttaaaggctaaataagagaacactcacttttaaaaggtggttcccaaattgccctagaatgtaagaggagttttaacatatgacattgacaacaaactctcttcatctcttccccaacaataccaaggatggatctcactccatcttcttatcatcactctgcccctagaaaattcccccgttctgctcaccctctctgtcttctctactatggtgtcagggcaaccgagtgggctttatttatggctgacatccctgaatttaaatcttagctgcttctttactttattgctaaagttttttttttttaccacagcttcagttacaaaacaaaaataactaccttctatataatgactgttgtgaagaagaaataagatgaaagatacaaaatatcaaacacaaaacttacaacttagtgctcaaaatggtaattattattattatcccaattaataatgttttccagggtcacagtctggtcctagtatcccaaataaaccctagagatccccaagagcatcccagaacctcttttttgagacaccaatttagttaccaagagtatcgcagtgggaaccccagcttagaactgagatgtcaaatacatcactgcttcgctgcaaccctgggcaagccaatgtctttctgtattcttcaccctccttggctgtgaaatagatcaaatgatgcttctaaaattctcccaacaatgaggtaatgtcttcaaagtgccctgagcctttcacagggaagtcgttgtcaaatagacacctgtagtcacagaaaaacggttatactctgggaatgatttgctcagttggttaccgaatggtctgagtctatgccttatgcaagccccaccctaggagctggaaaacaagggtgaacatgtgagcccagcaccctccttcaccctgtatggctctgcatggatgggatgcaaagaatctgacttcctgcagaacaatgggtgccttacccagacagaactgatctctcacctcagagagcaagaggggagaagatgaacatctatttgggatctactgggtccctccagattttctacagccacaacggcatttaattcttcccatgtatgtgcacacacagagaagcacggaaggatatgcaacttacccaaagtcacacagctggtgcatcattaaagctgagatcaaaagtacggctgccgacttccaaaatccatgaatgtgccacccttccaagcagccatgctaataggggccatcgtaattgtccagcagtaattcatccagagacagattcgtgttggccatatctaatggcctggctctcggtccccttctgtctcctttatgactcaagctaattcacgatgtgcttagtcagatgtccagttgccagtttattgtctattaggtttgcagagggaagggaagtaacatttgctgagcactttccaaggcccaggccctgttccaggagctcctggccatacataatctctcttaatcctcataatatccctataaagggggtattattaccccactgggcagaggatcataaagattaagtaactctggataaccccagaagatggacaaacgtgctggcctagcacctcgggaaacctctgaaagcgagatctgccaagcaaagcctcccacagccgagggagccaggcttctccacctcatcagaggcagagagtcaagggagagcagaatggatggtgtggcaggttctgattaagaacattcatcatccctgccccgctagccccttggggtggcatggaattcgttacacgactcctgaaccgtgttcatcctctccagcctcctcctgtgcgaacaccgtggaattagccaggaggggtagcaaagaaatcagatctgccctgcggaggctctgcattcccagcactgtgctgggtactttgcattgctcatctttcacttttacatcaatcagatttagtccatatttctattttgcacaattcatgttattatttcatttaacttttcccaacctgccaaagcttacgtagtgaagggacgctcccaagtccactcagctgggaagtggaaagctaggatctaggccctgttctgtcctccctcagggctccaaacaatctgtcacactgcagcagagagaatgaaggggtttccctcttcccattttgctgatggataaactgagtctgagagcaggaagttgcagagagctgcagagatttggggccagaatatcagtcacatgtatgcccatccagcttttctagagatggtcatgaagccaaagaggggaagtgacatccttaataaaagctcatttcagcaaaaaagctgaggaatctgtttaattgatcatcactcctcccttccacaacagcacagggttttaaatgggactgggctccctgtctggaattctactcctccctgaaatgatccgataacaacagagctgattgtgactggtcctccctccccttctctctcctgcagaatgtttttcttcatccctgttttgtgtcttcgtaattgcgttactcacatagcaacacatggggatggccacactacagccaccaccatcggggccacaaggagaaagcaacagcattctaggagaacgcaccactccccatcaggcccccttgaaccaggcggggctgcatggaggtcaatgcctctcagggctgccctcccctctggatcagctcccagaacatgccctttgcctctaaccacgagcaggggtcacctgaggcccttgattctagccccactttagctttcccacagagaaggctgagacgttgaaaggcatgagcccacgcctcctcctcgccagggtctcagtgactccccagccccaggaagaggagcagggagcccctcacccaacatcaggcccatgtcttggaaacgcaggggttgtggattcacatgctggtgctgctggtctgccccccgctccctggcctgggttttgctccatctctgagcaacttttggaaaagaggcagatctaggaaatccataccaagtcccaatatactctatggctgaaggggctgaggagggagctcagctggagagccctggcccaggcccacaagacagtagagggggcactgctccttgtggacgtccaaccaggctgatgtcgtcttcatccttctgtagggaccaaaatcttggtggaacccccacccttcctggcaagtcaggaggtcagtagaaccccccaggccagcattcctttcccagcctcattcctgcccagggctccctgtgacctgcccctcccccatgtgaggacactatacaccctggatactgtcccctttccattccatttgtaattgtccctggcagaaacagcctccctcaaatggtgaattctcacataaatgtttggggtgatgcatatcccagttacccagatctgatggttacacattacatacatgtaccaaaacatcacattatataatcaataacaattttatacataaataaataggaaaaaaacgaggttctgctagcgtgtggtttggcagctgtcaaatcttgtgctagagccgagtcctgaccatggtgtgccctccacgcatcgtccagctcacccatcctcccaggaaggccacccctctgctgggtgtcagcatcacggcacctgggtgggtgagccgctcactgccccgccctaccccagctgccctctctagccccactgtgccacgtccccttggcaaggccactgtctggagtctggaacacagaaaaccattcctggaccctccgcactgccaagtctgtaaaagagcaggcgcctagcctctctccttggaggctcaggccatgtcaatctcttctacgtctccctagtgccaagataataagggggaaagtttttttctcctccttccagagtgcagaccaattagcattttttaaattaccattggagaaatacacctaattagccactttaaaggaaagctttaaaaaaaaaagtcataaatttctaactggccacagcttggagacacttttaaagctaattgtgtgtttctggcactgacaggggaattggtgaaagtaagagaccgattttatgaccttggtgggaaaggggaggggaaggctgaatgacgtccttaggccaagaaagggttaatgtctgtctcccggaaccccaggcccctcctggctcctcctccccttcctcaccctccctcatcagatccccacctctccccaccttgagccctgccttaccccagtcaggggtacctgccttagaagaggcagacaggaaggcagacaggcaggcaggcagacagggccacacactcagccagaaaatcatacaaggaggaagaaaagggcagaggacaaagagagaggagaaggacaggggaaacagagaagaaagaaacatttgaggaaactgagagaaaggaaccaaagccaaattccagaaggctgtttctcatttgtgcttcctattaaactctccatcgaggtgggggcgggagctgggggctctggcctgctcttgaacatggtgcctccctcagacagttccagtggaggcagacaggggcttctgcagccctcgggcctcctgcccaggctccctgaccctgctcagtggccccaactccctgtccctgaaactgagaaaactcttcataaagtgcaggcacaggactctggggtgcctcatttaggaggaaggtggcacagggcagtttctggttgctcccagcctctgccactgctgtggattcattcctgcctcagaaaaggggaaagagggcctctcccagggggagatcagtgtacaactggaggagtgtcaagaagtgcggccaagcaagagaagatgcccagagcaactgcacagggcctccatcatcctgcagagcccaccgccatggctcatcagcccttcaatggcccccggtgatgacccagtagagcggctaaggtgatgggggtgggggtcctctccctcaggaacacccctccactggctgggttgccgggcaggagttagggtaggaacaggacagtatagatgtattgtctccacctctgtctgaggcacacagtgtgaccagcgctgtcatgtctgcccaaccctagctcagtgtcatgcccacctgacactaggtgtggcctccctgttggttgaaggggcagcagcaggtgtttgcattctatacatggaaacttagaggcccagaaacactgaggcaaatttgctctagtagcagatttagtaccatctaaagtcctgggaggcacattcttcattcactgagaccctcctttctatagcttaagtgagagtctggagaaattacagacagtttcaaaacatatagtcttctggaaagcccagaacatgcattctcaatgggtacaagagtgctccccagagggtgaaaattagagggcaaaagaaaaaaaaatcttagatataatgatttgtggccctccaaaggtcaacattactcaataaattcacatgtcgtctcattaaagagaatttaaattaaatttaacttgtctctaagggggaaaaggtgatttttaaaaagctgagaaatgctgacctagggcagtagcccctagagtcctagagtcccacaggccagagctggatccactcacctgtacccccttgggaccaagctcagcatatgaaacaagaaatggggcccaggaggggattcttccccagaactagtcagtgactcctactgaagacactcacaaactttaaaagtggtgggagacttgagcaacctagcagggcaactgggtaagacactgcaatgctgtctcttctgccagggcagagggaagagcttctgggagacaaaagaccttggggcctcttcctgctcctcaccccagaccttaaagccttcagagaaatggcgcactggacgtctgagctccaggaggttgactgagggcaggattggagtgcagggctggaaggattcatgaccttaaaaacagccaggggagctggggtgccccaagtagaagactagggtctacagcgccccatcagagcccctcacactcttccttttttcctcccctctctggttccagaggctgggaaagagggaagagaaataactacacagcagaatggacaggcccccacccacccagtcataaactcatgggtgacaattgtgggggccctcacctccacccctaaaagaattgaacctgggctagctcctctaagcgagtagtacagctttcagcctaacaagtatccatctttactggcagcttcaggggctggtggaaagagctctggggtcagacctgctgggctttgcacaccagcaagtcatggtctgactgtccctgtgatcttggagagtctggttcttgggaaggggctctgacttaccctattctcctgcccgatgccttctctagaacccatcatgcactacgtgcttcatacatgcttgcagaatccaatgtgatccttcctttgcaaatgtttttgcaaaaggaaaatggaagtgaccatctccccgcctcagggggttgttgggaatgttaaagagatggtgcggacatgcagggagaacgtgtgcataacaggcaaggtgggcatcccctccacatcccctctcctctccccttgctagaaaacccatatgcttctgcaaagcaggtgagacgaggcatgggggaggggaggacatcggcacagacagggaaaccaagggacactgcaggaaagcctccaggtgacatgggaggccccatgtaccccaagtgccctgcatgagctgccttctgcctgcccccaccagagaaccctgcagtgaagggacaaattcctaatagcggggacgtcccaggagggtccctttcctggggctctggcccaaagagccagcacctttgatgctttcccaaagatctcatagcagggaccccattctacccactcaggctgaaatcagtgggaagtccctatgctctccccatctggctctccctagctttctgggggtgatggatggctcaagagttgcaatttttgttctgttaagaaagcacaaacaatccgatgccaggaggcgaggaccttgctccctgttggcgcctggtgcaatccccagggagctctaccagtgtcagcagagaaagggaaaacagctgggtctctagggcccgagagcaggcgggagatttattattttggggtgattaaaccgaagcttccaacacctcagtgagtgtttccttcttgctacccctgctactcagacacaggaaccgtatggggcagcctggctcccggtggtcccctctgtcccggtccttgagaccactgccaagacactgcctccatcagacggccaagctctggccagcctccaggtcctcgcctacctcccactccattccctgtctgcaattgtttccaatcagtttaggaaacagctctgagaacaattagaaaagataacgaggaagaattacataattacagttctcctagatctcaggcacttcaggggaaaagaaaaaggctgaactgagtccaaacagggaccaatgtgaggaaaagatggtacttctggaaagctttcggggtgcaagggcttagaccctgaaggagagtgggaaggacaaaggcactcctatgtctgcctgctggtcagctgggggctgcctccagctcagggcctcaaaggacggctcagaaagtcctcatgcaatgcagacctctctgtggaatagccatgtagactacagaaccacgtcccccttcaagatcatgcagcccaaacttctcattgtcaagatgagaaagaccaagagagaaaaggtcttgccccaagccaacagaactcaggactccaagccccaggccaacactttgtccatgtgcaggctccttaacttctgtctttggtccctgggttacaattcactggtcccacccactggacagctgggaaattctaccttcttgaccaaaatggatgggtataggaagaactttgccctctagagtaaagatgggcaaacttttcccaggaagggtcagataaatagtttaagttttatgggccatgcaatctctgtagcaacaactcaactttgccatcacaccacgaaagcaggcacagacaatatataaacaggtaagcatggctgtgttctagcaaaactgtatttgcagacactgtaacttgaatttcatattattttcacatgccatgatatattgttcttttgatttttttcaaccatttcaaaacataaaaatcattcttcacttgtgagctataaaaacaagtggcaaacaagatccagtccatgggttggagtttgccgactgttgctctaggatgttgctagaagactttgtgcttctctgattattccacacccagagtttaaccattccttgactccataaacccagcatggtatttagaacaaggcttgatggtcagtcttttctaggtcacattgccgtggtaggccaggctattaccaactatgcaagccctcaggaaatcatcctacgaggtttactcaagacacctctgacgtctgtgagaacccagtccccaggagcagagtgggcagctggatgacagctttccctagatgggcaaacaatccctccccagaagaatatggaagaggaattgcgtctcaatctgcccctctctatgcagagggtatttgtggcatatgaggtaataagagaccaacatcctgagtttctatgcagcacaacctaacttaccactgtcttctcctactgcctctccgtttagcaacagggagtaccaagtatcttcattcattcaaaaccagcatattgagtgaatgcctattctggcatcatgccagaggaaaatcaggcacaggatatcagacacatacagacatcaagtctctatgcggttagtaccctgacagcagggacattactcctcttctgcacccagcacccagcaccgcatgaggcacacaggagaagctcaggaaatgctgagtgaattagtaaatcaatgtgcaagatggaaatggttaagtagcacaaggcagatcaaatcctatgcaagcagagaggagggagaattaggtccagctgaggaagccaagaaagggccaatgacagagggggcagttgagctaagcctgacaagatgagtcggattagggtatgcacagttggggcacagagaaagaggagagaaaaattccagccagaaagaacaactagcaaggcatgatggtgtctataagaacatgcatagctgaggttgcagtcttcatgcctcttgaggagtaatagcttgagtgctaacaacccagagttaagctgtttctagattgttgagggccaagaaagtcaggcaaaagagtttaaacatctgtaggtggtaggaggcattgaatcttctgagcaaagatggttgggtggcaatgagattaggaaagtgaacatggtggcagagtacataaggactggataagcaaggagtctctttaaagaaaccctaaactaggacaggagcagcagcctcggccacaccgctgggtgaagcggaagagtggctgtgggccagcgggaggaggtgggacttgtaaagtgattcatggttatgagtgtagacccgggaatcagataaactgggctcaagtccaactccagcacttactccctgtaaatgatcagtcctttctagaacccagtttccctatctgtaaaaccgaggcaataaaatggagtcatcatctcacagggtccatgtgaagctgagatgtggttaaacatgtgaagtgcttaccctcgtgccctgcatggagcagattctcaatagaaatttgctaatcttggtcaaattctgtccattggccaggagtcccagtcaggccagagaagcttgtttttgccagagaggtggaagggtagttgaccacagtccacaatcactccccacctcccctctccccctcccaatcctgggtggtaaggcacacaccacatcctcaggaagctgacatacaccctcctcgtcactcctcagccagctagtgaaaaccaacaaccagaaatgtgcagtcccatgtggggacctttgtcaggcaagtcaatgtgctcaacagaaaactcatagccccaacactgtgagagggaaggaggaagggagggggaagacgtgactcagaagttaaatgccttctttcttagaacacaggagtgtcacagcattcaagccaagacctctgacctgcaagacatctgacctgcaagagggctcacttttgggaaccctcatgctcacgatttaggcctctgacctgctaggaacatgatcagcatcttggcagagagagcacaggccctgcatccaggcagccatgagctctggtcttggcctcagcgctccctggccatgtgactacgtaaataaggacatcagttaaataagggtacgtgagataatgtgtgttcagcacagaccgtagcccagtgctacagaggaatctggaatttggagacacggttgctcacacctgagacgaggataggacctcgcctctcataatcaatgcctgcctgagaccttggtttctgcttaggtggaagtggttttaaccaggctcagaccctcctcatactgcctactggtggcctctgtcatgagctctcccccacacctttttagatggctcctctgtcttcctttgcgtggaggttctgtgtttctccacaatagtagtctcttctcttccctggtccaattacagcccaccctcctcactccaagaagctgggtatcccatccctgcatctaacggggtaccagaactggtgacggacgactcaccagtcactcgtggcattctctaagaagcctttagttagtcctctctgcaactcccttcgaatcccgtttatgagtgaccagtctcccaaaagcaagaatgccagtccaagaaagcaggaatggggatttgagaaaaagaagaaaataaatgtgtttctgtgctcagggaagctctccacacaacacagctcaacttcctactcctgcattgccatctggttgctactggcaaccaggcaatcatatttttctagtcccagatataatcatcataatcaatatagggtatttatcccactccttggttccaaggaactcaaagattttcacatctattattcttccttcactaacgtgagggagagaaggggaggaggtctgcttgttgatggggtgtggggaaggactatttcacagatggaaaaactgagggaatgggtaagaaggaggctgtgggaacatctcttaagaaaacagtattgctaaaagcagtttgcatttggatagtgcgttcacttttgaataaaagtgaaaaaaatctcatctaatttttacaacatccctctaaagtaggttcatttatcgtatagacaaagcccccaaaagtaaaggatctttccagaaacacaccactagaaatgacattgcctaaactcctaggcctttcgagtcccttttagcatttttttcccgcagcatctctgcaaacaagtacagtacattgttggagctatcatgtctcttgtatgcattaccaccccaccattgtaagtgtttctcattatacttacattgtgcattacagtggctcttacacataggaggtttctgtctagttccggttgatacacacaccaaatgggcaacagggccaacaaaaatgactagactaaagcacttgactgcgttggaaaacttaggagccatatttaatttcctaaattctataaatgttcctttactagagtaaaacttggggggaaaaatcaatagttttgactctgagatcactcaccgcttttgacaactctgtgatgttaccttttcctacagccactggtttgatgtcaccttttgtcacagtaacaaagcaataccaaaaacatgctttgggggtccctgaagtggacaggaagccttctaccctacatacccagcaaaggcttcagtgccacccttgctcattagtgccaaacacaggtggctggaggtaaaaagacactcaatgaaacacaactgcaagagaaaacatgtggccacggccacagcagaactgttctaagatagggcgtctttctgaggtttgtgctcagcattcatttccctttggagacagtagaaacaccactgaaaggaagagagtagctggcttgtgcatgaagcttcctctctgttctcagaaaagagaaccagctggacaccatcttatcttttatcatttcctacttagagagctgcacaatttaccccttagaaggagaggccccaaacagaagacctgacctgtgatacctgtgatatccgcgacctcctgagcaaggagataaaaggactcaggtcagccctgacttcctaacctcatctggcacctcttcggattctagaaagaatcaccatattggaaaattccctccataccctcattccattcagttgagtaggcagaggggggaaattagaaacaaaagtgcctgacatgctaacaccaggctaaggattcacagaaggaaaagttgatgatcccagtccctagagatggatgaaccagtgtcagcccatcaatgaaagcatgttcagcacctactaggtgccattactatgcaactattccaagctgggtcttgaaaccaggctggtctgcccaccactgcgcagccttgcctgactccaaggacgcttcccgcctttggttgcccttcctttccgttcctatttcctcagtttctgacactttgcttttgtctctccttctctctccccagtgccctcactggcatcagatttggcactccggtgctggctttccaagctctcttttggccacagtgtgcacccagctcccggttccatggttttctggccaccgtagtgtacccacattgctgtccctggggcccagctcaccttatccatcttggttggcatctctgccatgcctgtcccagctgcccagggtgggaggcaaggagggcagagaggtaggtgaacactctgtgcatgctatcctgtctctccctgatgtttagcaaaattcagacttagaagttcagattccctcaagacacaaaccagtttgtggcttttcttaagtcatgctgtttcaagtctatcttaaagtagattcctgactacaactattgctttctttgtataatacttgcttctttccaaggagcttgccatctgctatctctttttagccacataacatctttgggatgaaacgtagtcagatgaaagaacatgaaccccatcttgcctcatttggggacaccaaggcacacagaccatgaatgatgttatcctaagtgtggaacggtgagctccactttgctctgaccaccttcagctgcataagctggcacagccttgacgggtacagatgtagagagttagaggattagtctcttgtgtggatgaaacactagccttgccagggatttaccaaagtccccactctaatttttcacccaggatgaggaacccaagtccagaggctcaacacctctttccaggtctctgctctggggccaccctgggaagagacacagggctgagatccaagttcccagtctgttccatctctccccagcccttctttatgcataaaggacacttgttggggagtcagtctgcgcttctggcatctggacacatcagcctatatctctaggactcgagcaggaagtatgtttgcctcgcctcgggcttcctggccacacagacccacgtcctcatttagaatggtggcatcatggagccggctgagatctgcagtcttcagtgtcagctgcgggtccacaaactcctactgaacacgtacccatagccccaggggaaaaaacaagggaggaaagaaaataaccaaggtggggaggggggagagattctggaatctagacaacatcaagagccctgtttccatgacaaccactacttaatacagttgctcagactgcagcctgttctaatcggccccgtggatggagcctgcagacccagaaatggcctccagccacggggctcccaagcagcctggaggaccaccaccatcctccaaccaccccaatctcctacaaagagaacagagggcaaaggaggggtgaggctcacaggggaggtgagaaagaacaatgaggagtgttgaagaaagtggaaagtgaaaggaaggagtcagagatacagccggacatccggggggttgtctgtggatgtttgctggggccacctgtgttcggcaacacttgtctttgtgttggtgagcctgtgagcacccatgagacgcatgacaggctgtagccagcgtgagtgtgaccatccacagcacgtccactgagcccatctcccttccccttcctacacattggagtacccgcttcctctcttctctcttcccctacaaagctctaagctttgtagtccaaggataacccctgtgaggcaaaggccagggtcagcagccagccagtaggtaccagcagcttccaacaatttctcagcaaattgttgggatagaaagaacaatagtactaatattctctaaattagaggtttctggcttaggggcacccccgaaccctgctcctcacagacttctccagttcccagaaaatgatgggtgacttctaggttttcttccaatccacatatgagacctcagaggctggcaacttgtcaaagtcacctgctgggtcaggtgtcagcctggagactctgtccctggaaagccacacatctccctgcatactccaggctgcactctccttcttcctgtattcatctggcaatcacccaaacacgctgcaaatcagatgacatatgacatgctgcacactccgtccaactctgaagggagtccgtctatggggacaatgggtctggtttatattttaagcagctagagtgaaaaacggggagtgatgaggtaaggccatggcaacgaacaccatgccactatccaggataattacttcgcccagccatcctggagccaggcggcggaagccttgccccatagattatgagcaatgagacagggccagccagcttaggaattcccttcctccacctgcaccttcactgcaaatggaaacacagcagaaggaaccaatgcagtgggagatcccaatcaaagcaagatgacctgtccctcaatttccaatcgttggagaaatgcaaagaaaagtccctatgcatacccctcctccaagttgctacatggaaaatcagagctctgaatttcggtgatggctgctgagccaagagacaaggaagacccaaaatcagcataggacagagatagtgaaaaggtcagtgagcgagagagaggaaaggagaagctgaaagatgtttgccgcaagctaggaatgacctattaaaatccccagccactccctcaagctgggatgcggtccctgttggtggcttcacagctgctataccccactcaatgcaggctgcttcagggctccaggacacttgtactattggccagctcagatgccacccctgcaggagcatgtggaaccatctgacttggatatgactgggctttcctgctgcaatgccctacagatgctccatcgccatatacacatgccttgctcagggatcatgcccatgttgaccttggccccaaaacacggatgggaaggagcatgcccagggagcagccttatattttcttttcctttgttccctgagtcctcagatgaaaatggctacaagctgatgctctggagaagagaatccaattcagtggccacaccaactaatacagggcatccactttgctcttcaaagacaatcagaagtgcaatagtcagaacatggcgcataggaagatcctgaaaagtccaggcctgtgccagctgcctcccttcgtggtcctaagtgcaaccccttaaagtatccgaagaaattgactcctgaggggcagaaatctagcaaggagggatgtgaccacacgtgtgtgtgcatgtttgcatgcaagcacgtgcacagacacacacattcttacaaatgaaactgcaatcactggtgatgtgtgggtgtatgtgtgagagttagggggttgtgcatgtgactatgtgaagctcgggatcacaaatggaaggagagctgcatctgaggaaaaaaaagaaaaaaaaaaaaaaaacagaaaaagccaccagccctgtaccctccgcaccaagagatccttagcttgttgcactctcattggcctcttcagcctctcctattttcagtgaaactctcctttgtttctcccaccccaggttggccccagaccactaaatacacaccacctgaagatacagcaaaacccagaagtggtgaccacagcaacatgagtacacacactgcagactgtcagcagcaggagggtcatgtgattgcagagggcagcctgacaagcccatgtgattccctccacattaagtggaaaacactgtctccactgagaaagagaggtgaagaggtgggaggagtgaaaagtgaaattaacttgagccaagattacgcccatgggttctgtggaggccaggccggaaggaaagtcaagaggaggggcaggaactgcatccagcgtgtggttgtgtacggttgtggttctgggaggatggagcttttgagaagtgtgtctctggtacaccctatgcaggaaaacctcagcacgacttacaggtgtataagcatgtgtgtgggtttgcacgcagcatgccaaaagcatatttataaattgggttaaaggttggttaggaccacagattctggttaaaataccagctttagagtatatgaccacttagagcttcagtgtcctcatctatgaggtgtagataacagtaagtaactatcatagggttgctttgatgacataatccatgataaagcacgggacatagggcctggcatgtagtaagtgctcaataaatactaatttggtttattattatttgatgttccccatgatctcaggtctaaaatgacatagcaaaaatagggtaggtagatacataacattattatttgcaagaaagccacagttcatattacccagttaaacagggaatggctaacttctcaaccacacactgaatatcaagataggatgataattctaactggataatctcagtattagtctaacatatatttaaaagtatcccatagtgtcattgtaaagcaaggactttgatattagactatgggagtattctatttttgccacttgctggtaattaggctggcttagcctaatgccctgcacatattaacacctcaatagctgtttttaaaaattacagctctgtggagttttagatgtgcttaatattgacaattctgttcttggtctaatagctttttttttcaatcatccttatagctgattgtcaacatatcaaaacaaaaagatttattccatatcaactgcccactgctagacagtaagtcatcgatggactttcacaggtttatatgaaacatatggatgtattaattcttcaacccacattgagatgaactgtcacgtcccttttaaactccatcacaggcagcaagtattaacctgcaattattaccgtgtataacgtgctttacaattggcaagaacgtcaacagtccctggttcattcagcagccctggtatcattcacaaactgcagttctcttttttttcctcaggcctggagggaattgagaagcagaaaataatctcaggcagatccagctgccctgacacttgcagtgcagctggcaggtgccggagcttcagacacgtggcccacaggtgcaacaaacccaccttgcttgggctctgcaaccatagagtcccgccccggccaatgaagccatccctgggggtctctgaaaattctccaggctatctgcaaactggtctctcagaatgtgtggccagctacactttagaatacatgaacaagcaatttacttggtgattcacattgtacatacatgtatacacacaggtacacatggatatacaaatacacaatatatccatacatacatgtgcatgcatatacacacatatgcatatatatacatacgcatacacacatacacatacaatgtgtatatccatgcatagctacccttcccagtcaccttgggtgacacattttgctggggatctttgtgggagaaggaggggcattttctgctgctcaaatagcttttggaaccaaaacatttgcaaaccacttgtttagggggcaagacctgaactcaaggagcaagacctgaactcagaggttcgcacaacaggtgaccaaccaaagtttgcggtcctaattatttctactctcttttccctttccctaaaggccctaggacagtttcctctgcacccatggtcctctaggccctgctgagtagggcactactagagagagaagcacctggttcctgacctcaaaaattcccagtggtgaatgagcagtgtggcactttgtaaagctttatggaattaggataaatgcttctggctattggaaaaccttatttcacatgtgcacacatgtgtgcatgtgcatgtgtgagtgtgtgtgtgtgtgtatgtgtgtgtgtgtgatctgtgtgggcttgtgccatgctgccataaaacacaaatttatcttcataatagggtcaattacattctccgatttccccacaagtgaggcaacaaaaacaaattttgagcttcaacctgcaggagaatgccaggatctctgtgttgaaaaagggagccttggtttaccctccccctgccttgcacagacatatgttgcacagacaaacacctggaaggtgcttctcaattctttgaggttgctgcctctcacatgcagctgtcaaatcacaccccatcaacatgacacagcaaataacactacgacacgcaaccagcaacttttgaaagtatactctccccacacccagccccgtctgccttctccagcgtgggctgctgtcttcaaactaaccatcctgaaactgctttaaagagcctgacaggtaatttattctgtggcagaggatagcaatttcattgtccagaggcaagagatccaactatatcagaaaatccgtactctcaaggaacacaggtttaatatgataacgattctaagggtgtgtgttcataattcttcctgttctttcctccccttccctaaagctgctagtgaatgcttttgcagttttttttaagggccctccaaagaactgacataaaataaatcaaatattttaccacgaaaggtgattatcaaacacttatttgtgaaaagagtcaaccagaaggggtcaaggcctagctgctgttatgggatttttgcccacaagtaaaatgtttttaaaaattgcatctgactctcttggcagaaaacctgctgggatctataaggtttcacttgggcacctggtagagaaggggatgaagagcaaaaaaggttggtgaacaggacaacatccgcttctagaagcaaagtcaaggccgctatgcacttatttttccaaaataatatgatagttattttcacattttatttgctaaaatccatgcaaagtaagtattattatttccattttacatatgaaaaaaccaaggcttaggatattgaagactcagcttcctcaaatataatataggaacagtagaccctgggtccctcccaatggtaaatcacaactttgcatggtgagctcccatcagaaatagaactagaactgaagtctcctaactcttagtctctgcctgctagctcccaccccatgtgactgcatcagatctgcattgcaacaaaaggtaaattcgatgggtaggtgatttttaaactcgcctttgtcaacgaacttgtcataagatcttggacaagatgcttccctttttagtattttggaagattgaccagtaaggggaggctgatagctcctcagatcatcgtgagttctttctgggtggcagtgtccagcacagtgcctggagtacaatatatcctccataaatgctcactgcattgaattgagaataacaacaaaattctcttaacccccactgatgttccctagctaggagcacgttgcgctccgaagcacaggacattgcccacagatcccaaggctataggacttagcatttccatgggctcattgcactaagctcagtgtttttaggtagtaatgaatggaattcttttttaaaccctgcattcggagtctatttcatgcctttttacatttcacattatatttatatttttaaaaatcattacctattttacattacacattttaaaaacctattcagtcaaataataatcctattccttggctgccagtcagggaaatgaaggtctcacaaacagtgatttgcccaaggccagcaaagactgaatatcagagaaggatgatcccaaaggtagactcagcttaatgaggccagaggtctgttggggcttcactttggagaagtccttcagggtaaggagtgccaactgctttgtgaagtggcatgccaccaatgctcggtcaaaatcacatgcaagagtgacactcctgacctcaaatcaccagttgatcagagtcaggggcaagacaagggcacagatcttctgaggctggagaaccacgtgctcaccctatctgggaggagccccaagcccttaatgatctcacgtggccttcagggacacccaggcactccagagacaaaaagagaagacagatccagatctgaaagagcagagaatgagttgtcagtcagggacaaagagtgggagattaagggaacatgctaagtgtcactagcctggattcttgtgtcagggccacagaggtccctgatgccaaaagctgggataagcctgtgggttgcatataagttgcgtatgaagttactgcttgatgccagcaagcactgaaacaagaaagagaagcctgtaaagatggaaatgaggcaactcccaacccccatcccactttcagaagttttaacagatgtcctttccactcccttttttcttgggaatgcctcaagattcttacttttctcgaacgggcaactttccccaccacctacgtgttctttctagattccaatctgctgcttctccatggggttctttctgttctttttcttttttcttttgctgacctttgtcctcccaaatgttatcactcagagaagtccccctccgcaaacttccccacttaagtgtgctctgtgcccaggccctgggctaagcacgagatgtggaaaactgaccaagacaaaaaacagtcccaggccaacctgacctcacagtgtcaggcattaagcaagtaaccaagctgcccgcatcagcaataccttctggcccctgatttttctgtctctgcgatttaccttgccctgatctagcagacttaaagggatcagtttttggggctggcacggcctgagaggtcaaaccccgggacacagtgcccaaggctggctggcgtttgatgggatggcaccagtagggtcctattggttgctgacaaatagagtcggctctgcttacccagcccgtgctgcaccagcttccatctgaacacccctcctgctggttttatcacgaaggagaccaaccaaccgaagcctgagatcatggtacagccatgcagatagtcagacctctccatgcttttcccactcctgtgtcttcaggggcctagctccctcagattctcttggggaacaagaagctttgcccaactgagggatgttcctttgctgatgtttggaggttttccttcctttttgtggccatgttcctacagccaaggcaaatccaatcagcagtaccatccttgttgcaccccgtcctctgtgggggaactttcccggcttctgggctgttctccatctggttccaaaatcccaagccttcagagagagcagtcgcactgcctgaagtttaaatcaactaggcaatttgctttctagaactcaagtctgccgatactctgtacagtttttctttcctcagtgcaaacgagaaactgatggtttcatgactgtgatctctctgccctctcctcccagatgtttctagagtcaattccagctgccaccgggcctgttgtccatttcctggcacgtgctcagtcaatacaaataaagacgatgagccgacactgcgcgtggtcgtgaccatgttcccctggattgccctggacttggtcttcctttagacacttccctcttcattaacctcacgtctgcatcctttctttattacacataagtgaaaatattgctattgaaggattcagcagagaaaatttccaaagaccaacatgtggcatctccagggttccccttcattttctaaattggtacttcactcaaaacatttctggcataacttcttttcaaaaaatgtgtgcttccattccaagcaacataataatagaccaatcccatcagtgagcagaggagggccatggattcctttggctcccctgctgccattcagtgctaaaacactgtccaacaaagccacatccacctcagtgaactgggtgggatccccctgcctttgttctttctctgcaaatgcctggcttagaaactaagcctgattgaaaacctgcagaccaacttaagaacattgtcttgctgaatttcagccttgattaatacccttttctagaatctgaaagtcctttgtcttgaaactctagtccacacttactcctgtccttcaaatttggaaattaaaccagatactcaccttctcatcattttaatgatgccctttggctcaggtgttgttgtcagaaagtaactcttctctttctttttttgagaagaagtctctctcttgtctcccaggctggagcgcaatggcgccctcttggctcactgcaaccacctcctcctgggttcaagcgattctcctccctcagcctcccgagtagctgggatgacaggcatgtgccaccatgcccagctaatttttttactcttagtagagatggggtttcaccacaatggccaggctgatctcgaactcttgacctcccaaagtgctgggattacagatgtgagtcactgtgcctggctgaatgtaactactttattgacaaagaggacccagttctgtcctttgagtatcttgaatggcaggtgtcatctaatgaacatgtaaagggacctaagttccagtaaccccaggcagcctggtgcacatctgtgttaaggtgtgtgtgttggtgtgggagggtgtgtggggtttgtgtgaagctgtgccaacctgtgggtgtgcaaccatgcaccctctccactttccccacacctgagtggtctgctggtcaccgtcagtagaccatgcatgcaaaatcattcttctggacgtgcaggagaaactgaaaaccagcactgtcaggtgtgttaaaacccttaagattggttctcggctgggcgcggtggctcactcctgtaatcccaacactttgggaggccgaggcgggcggatcatgaggtcaggagatccagaccatggtgaaaccctgtctctacttaaaaaatacaaaaaaattagccgggcacagtggcaggcaccctgtagtcccagctactcgggaggctgaggcaggagaatggtgtgaacccaggaggcggagcttgcagtgagccgagattgcaccactgcactccagcctgggtgacagagcaagactccatctcaggaaaaaaaaaaaaaaaaaaaaaaaaaaaatttgttctcatgaacttcctggcttagccaaccacatccacccttccatgtgtaggttaatattcccaatctgccacctgctcctccttctatgtgatttctcgagcagatgcaaagagacttgtctggggcaactcacaccccacaccatcttgatttttgtctctggggtcttcaaagccctctccttgccacagccgagtgagcgcccctgccttggcatccactcatctgaccatcatcagtgcccctgtgggtcttccccctgaaagcatctcacacaacacatctagttgcctactgccatggggtacagtagataagagacttgtctccatagtgtgaaccagaatttattgcatctgagcaaatcatggtcacagctatgtagctttgacattcacttctagatagataatggcatttttcacgccaaaattctttgaaagcaaatatatgatctggcttcattccacaaccagaccagttgaaacacctcacttccctgtacagaaaaataaaagtgagaaatacaaaaaagcagtcctagaaatgccactgaccccaccctgtggatggaaggcagggtgggatgggaccgaagggtgccaggaagctcttctctctgggggctctgctcagccctcactgtgtcccccctcagggattccagctcctcacacagcctctcaggctcacgtgataaggtgggaaaatgaaggtcaaagttaaagagcaaaaactcccgagaccttgatgaaggaggttgtttgctgtgccctgaaagttgagctgatgtctccctggtaggcttaggtcagctctgctccaagttaacacaagcccaggagccccgatggaggaagggaaggcccaaggcggggcaagactaagacagccaggtgtggtcttgagcacaagaggtagactgacccccaacctccctgagctacacgtggataacagtgcaaaccctttaccgttgttgatggttaaacaagaaattgcatgtagcgtgcttagaccagaggctgcacttcatccccactagtaaaggttaggtaatattaataacaacatacgaacaacaacaaataccccattatacttctttttgtcacctcacagcccaacaaactaggcacaggcactgtcaccatcccattatgcaagaggaagtccagcccgtgtgccattaactatctgccccaagtctcactgctaaaagaggaattgaaaggggaatttgaaaagggtggaactcatggattccactggaggagcccagagaagaaacctggtaaaggttttcaaatggcccagctgcccagacaatgcatgaaatctgaactctgactctatctctcttagcctttgaactgcctcctcgaagagaagtgaaacttaactttataaaccagacactaagatgcatcttttaaacaagaacatagagtagctcttcccctatatcaagcatcaactatccaggtaactatgttacctcattgtatcctcacaaaaaccccaccctatccgaattcccaagggttccattttacagaggaggaaatagagagtcaacaagctaaggtaatgagtctgaggccatataactagtaagcggtagatctgggattccagcctagagctagctggtctttggcaccattcccctttgcagcaggcctgcagcagacacacacacctttgaattcctcgacaggcctgtgcctggaccttccatcctcccttcctctccccacccgcccacatccataatgcgcattttcattaggcatctttgcccagtgatctgctgatttgttatattagaattgcaaacaaatgctctcatttcatcctcctatcccctctcttgccctcctgacatctgaaattcagcattgatttttctggccccgctccactgcctaactgacatttccggttgatttcaccttagaggcttgcagttggctcaccaggctcccactagagcccagaatggaatagcgcatcacctggataagcagaattggacctcatcccctacttcctgctctcagtgctctcactgtgtcagaactcagtgccctctagactctgtccccattaaccgattgatggatatgcatacctcagtccttcaagattctcaatgggaagggaaggaggggaaaactgtggaaaatgtcctgggaggtgggaccaggtgaattttgatctcctaagtactgatgttttcagccatagctggggtaattggacctcttgtggaggagaaaggggattatgaggaagaccaaatggactgagagatagaggtgggaaggggactgggataccatgttacaaacagaggatctctcatatcttaatccatcagaagactcatagaatgatcacttatctaaaatgggacttaataatccccagaggtcatctaagtcagtcttctgtccacaccacacagcacatcttaggaaggtgagcatctctcctaagtttaagaactcaagctgggtgcagtggctcatgcttgtaatgccaacactttgggaggccgagttgggcagatcacttgagtacagaagtttaagaccagcctggacaacatggtgaagcccacctgtacttaaaaaaaaaaaaagattaaaacactttttaaaaaaattagccaggtgtggtggtgtgtgcctctggtcccagctacttaggaggctgaggtaggaggattgcttaaacccaggagacagaggttgcagtgagccaagatgatggcgctgcactccagcctggacaacagatggagatcttgtcttaaaaaacaacaacaacagaaaacacctcaaacaaaaaaaacgtatagcatctctcacaccttctagcttctgtctctgataagtacattggactactaggttccaaacagagctacgttttcctcccaggacttcccattcccagtgggtactgaccagtgggtatccaagttggttttttatggaagcttccattttgtcaataaggaataggcccagtgtcctgtgaagtggtcagtggtgaccagctccacaaggagaagacaactcacagaggtacactagagtggccattgccagctcacaatagctggttgttacatttttaggaagtttgtgatccagttgttaaactattggtagtttgcgaacaccagggtagaagtatttacaccatagaaattggcatctgctataaattagggcttcttttttctgcagagccaagagtttcatgaagagggtgcccagtcatgtggtcaacatagaaagagggagaggcatagaaagggtggggtgaggaggacgaggtggaggcaagtcagggaaaccacattctttagtatcctcggaaaagcaaactctaaacaatcacctttccttccttcctaactaggaaacatcttattccctctgcagctatatgttatttcttctctaaggaaagcagttattgtttcttgttctcagacctaaagtggagaaaactagagacagaactttggatcctatcatttctcagaagccatgagtcagagaaggaagaaccaacaaagggctctgaactatagactgaattctatatgcacatttatacatagcccagttctagttgtctctagagatttcttatgtagaaatatctatacaagacaacagctaactgtagagctcatcaaaatcagggattgtacctttcatttcttatataaccatggttgtacctggtaagatattaatgttacaacaggtaatgaataaaattttggtttattaattgaatcactttgaattgaattggattggtggcaaaccactggtttatgatcagatgtcaagacttttcaaatcccttttctaagaggtaaaaattagctggttggctggctggctagaccaatagacactgattaggcatacacatgaccttataagttatcttgagctcacacccctggctctactcattcctgtattgtccagttggatggctttgcttctttctccacagttctcctggcctcttactcagatccatgtgctttgggcttttggttcttagtaagctggtaacttggcccctgactacattcaactgtgcaccttgaacaacccaaattaaaacaatccaaagcctagtcaggtcaagacaatgaagctggtgccaccatgtccacattcagaagtggactcagaaggcaggaggaaccatgttctccaaacccccaactcaatcagtgtttcccactgcagatgatccatttcagggaaaccatgcccaaagagatgaacggacagatcctggtcacatggcaccagctctactcccataaaggggtgaggaggcagaggtaccttatttagaaacctgtccttttctggatcctctgtcacacatgactgccactgtcacacatgactgccaccattggtcatgcttctctctttcctgacagcttcctccagaaccagaggcaaagcaccttcagtgccctgtacaaaagcccaggtttgctgggctggggcactgcctcaacagagaggcccatcctccccaacctagtggcagaagtccagactacttccaccctaatctggcaatgggtgttcgccttgggggaaccaagacctctctgagaatcttctcaaatattttggaaaatgctcatgcatccattgttttacagacaaacttacagagctcagcggctgtgacagtccccctgggggccctgggctaatggcctctgatgaaatgcctctcccagtcacactgtccatttccttcctggacaccagctcctgtttttcatttctcgagtcccctctgtcctccaggaaggaagatgactgctctatggtacacctccacatacaggtgagcacactgatatccacagaggccatgcaacttgctcaggctcgcacagaagttactaggagagatgggatcgggatgtaggtccaggaggctgtggctctttctagaatttaatgcagccacacagtgctgtgtttgtggatctcagaagcaaccacatcaaaaccctggcctctactcttcctcagctatgaaggaggtatgaaacctcatacatgaagtttcaaaatgggagggagtgctcctccaaggaagcaggtaggtctttgctcagaggtaggcgggacacgtgattagctctgtgtgtactggggtgatgtcttcagaaccaataccgtaaatgcctctgacacaccgtttccactgttaatgagaaagctctaagagccattaatctcattactgttctatcagcagccagtgatcatgttcatttcactcctcctctccaactccttggtcactcagctactgagaagggtggactgggaaggctggaaaggccaggaccctgccctcaactgaagtcaacggtggcatcactccagaattcttggagcagaggaacctgctcagcctgctataggaacaatggccaaggaggcagctgtgtccccaggactcctagcccccttagtgggcctcttcagccctctttctctctgagattctggagtatttctgtatgtccatgagggagcactctgtcccactatggcctggagctccctgagcaagtcggaggcccaggaggcccacatggatgagtcagtccctagtcctcttgttttatggctcaaggtcctctgcaggggtggaatctttgacccaaggctaaggagcccagaaagatgattcaagtcagagaataattccaggtcaccctctcttctgtagccacaccttcaaggtgtagattatacaaacccagaagtcctagttactcactaacccccagccacttttgtgaaaatggcacttgactgctatgccttatggaagaccgtgtctaaggaaggagcgtgaggccaggtgtggtaagtctagaccacgagggactcagggcccacccttcacagctgaggcctcatccacgctggtccagaagtcttcccatcataagcatctcatcttaaggagcggctgggttatattccagtccttctggctgatgtctgcaccctgggcctcctctttgctgcatccttgccctgaggcttcttgaggttatcacaggaaaagggttagaggcagcagcggctgctgacgtcacatcagtatccccttcaccaccaagagccaatgtgctgagcagcttagagggtatttgaggaagcatgtccacaagggcagatgggcctggtactcgggaagttgggaaaatacaattagacagaagcctggtcccaaatcaaaatttcagtaagggcttgcctgcactgatgtccagcaaggaaaggctatttcctttgtggggtctcctgtactctgttgtcagccctgcctgatgggcccagtgggtaaagggcagtgagctgagctgtcattgaaatatccctgcatgtagagagtctttctagaaggaagcaagagcttggtccacggactcccatgagactccaaaaagagaaggcagtgccggcccctggaagagaccaagctcacactcctaagctaccccagtggcccaggagtgattggcacagggatgggatggggctgtgtgggaagggcaagttcattggtaggcagggccctcctggccctgacagccaacgattcccatctttcttcaatcaataaaacttctgctcccttcagtctgtctggaagctcttcccaaaaggaggctcaaagtatcagacaccaaaatattacatcacactccctgcccacttccttccccaagagtcctctcttattccaaaaagggatgctggaaggacacacaagagtttcttgcccttttcttttggttttatttttgtctcaagtctggcttagccatgggagtcagagtagagaaagaagatgttttcctcccctgctttggccaggaggataattccaaaggaaatcaaaaacctttatctgtcatcatctcccccagcaaggcatcccagcaccatgcatttaatagaaagagaaatcgttccagcatggagagatggaagagacagcaataaaaggccaggcttctgcctcccacattagcgtcccacccatcaggaagcatgccaagtcacttcagacccagggagcctgtggcatgcccatctctaccaagtacatgttagcagagctcagaaggccaggaaaagaagaagtaatgtgtccaacacaaggaaagcgatggtggccatgacgtcttgggaaatccaaaaaaacatggcacacagtgtttctagtctcgcatctctccctgcaaggctcattagtgagccctcacacactgcaagatatggtctgaaaggtgtaagggtccagctcccagctccctgggggcctgatactctaccctctcgcttctgtggggagagatgcaaagaaaggcaatatggccatctcttcatgggcaactctcttccaacccaagctctctgatcttcaaaggggagagatggggttggacatgagcatcagtgcaagggctcagagaaatgtatcagctgcaagacagctcccaagatggtcagaaatgcaggtcctaattacatccctccattggctatgaccttgggtcaccacacaccaattatttactctggcaaagtgattagggaattggaaccagggaatggatatgtgttggggtagaggcgggaacctgggggttcagaagatgaggatggcagtggcaaagatgctccttctgcatctgcctcctcctaattggggtcactgcaggcaacagttagggagccacgcaccacgttctagtttttggtcatggggaattatgtagaggccccaaaatgacaagagaagtggaggaaaaggaggagagaaggataagggccaaaaaaacagttgcccatgaacaaatgcaaatcctatgtcaattagggagaggatggaagcaggtcaacaaacctgcccttctcccaagaagagagagaagtcagatcaggcaggtgggagagcagcaaagatgggcaaggctggagagaaaggtgacacagaccccacacagggactcagactgcagggccatggttctccaattatgaccctaggactagctacagctgcatcactcagcccttgtgagaaatacccctttttggatcccaccctagctctattgactcagaaactatagaggtgtgttttaacaagctccccaggtgatcccgattaaccttcaggtctgagaacagtccccagaaggaaaaggaattccagtttcccattgcatcctttgcccacagtgagggttttttttttttcttccagacagtctcagtgtcaccaggctggagagcagtggcgcaatctcggctcactgcaacctccaactccctggttcaagcaattatcctgcctcagcctcccgagtagctgggattacaggcacgtgccaccatgcccagctaatttttgtatttttagtagagatggggtttcaccatgttggccaggaaggtctctatctcctgactttgtgacctgctcaccttggcctcccaaagtgctgggattataggcgtgagccaccgcgcccagccaatgagtgcttttaaactccaaattccccttcaagacctcatatcactttcagtgactataataatcatttctctccagagatgtagtctttgacccaccgtcagcagaaaggacatcagagtgtggtctattttgaaagagcagaatgaggtttgcaccacatgctgagcacacccttgtccctgctctctggtgtgggcaacagcctagcagcccactgggtttagtgtgtctgtcatcaccacactttcctgtgcaggaatggcagcagcaacaatgctgtcaatgaaagtaaaggaagcaagtaagctttgagcacccatgttgggcactgtcctgagcatttgatatgccttctttcatccaatcttcacaacagccccatcgtatagacaaaacatgttcagaggggtgaagccatttcatcaaggccacgtgactcttaagcctcatctcaaagttcttgttcctgcttctgcattgccttcttaagaacaacaacaagaagcctctccattttctttgcagttaatttgcaaaccacaaagccaaaagctgacttatcacccttgcaagaaaaggggcttgggttctgtgaggggcatttcttggctttaacaagaagctgcctgggaaatggccctacaaaaggaggccaagtagagtagggcatagaaaggacgttgttctgagctgaagtgcgcccccccaaccatgtcactgcctttccacaaattcatatgttgaagtcccaacccccagtacctctgaatgtgactgtatttggagatagggtctttaaagaggtcattcagttaaaatgagatcactagggtggaccttaatgcaaactgactggtgtccttataagaagaggaaatttggacaccagtaggtacagaggaaaggccatgtgaagacacaaggagaagacagccaaagagagaagcctgaggagaagccagccctgcctataccttgatcttgggcatccagccaccaggagagcgaaggaataaatgtgggagccacccagtctgtggtactgtgctatggcagccttagcaaactcatccagatctcttcctgtcctacggtgggctgtccaccttcccacagctccttcagcatcctcgatggggccaatgctggccaagagaagcaggttctgtgtatccctgcactgggtggcagcctgaggctgtagaagtaccaccctgactgaggaggttgggagacgtctgggaaacaggcagccccggctgtcagcctgcagcctcgcctggacgctgtttgcactcacacacactggcaggtatctgtggtcatcacggtggctgttccgctgtttgcctccctcctggcaggtgcctgaaaataaagcatgaagcccagacagcccaaggatggaaaatcatggagctgagacaaaacacgtatttgcagagaacaggttcaacttcaggggtggggaggggcgcctggctctcaggatggtgcagagggaatgacagagaggaaggtatcaggtgtgcagcaaagcagaacatgagaaggaggagagggccaggccacattcaagtgtgcccaagtatatgacacacacacacacacgcagagtgagggccgctcgaattgacacttggagacatgccaaaccccaatgcactcactcacacatatgcctgcatgcagaccctgggtgacacacacaagcacagtcttcctgtctgttgggagcccgcgcagtatgtttgctgagtgaaaatgctccttggagaatcctccgtttgcattctccacacacaccctttctttctgggcttcgaaattgtgcatcaagcgtgcagctgtgaaaagaatgatacaagcagagaagcctgccaggatgctccatgtggcctagcggaggggtgggggagtggggcccagatggtcctcagccagtctgagggtgtgggtgcctggctcccagtgacctgacttacagtctcagtccctctcctcccctgcccagacctgaccatcaacccctctgcccacctctggaggcctgggaggaagatgtggggcatgcaaagttgtcaggagaatgcaggtgaggccagccttctgcagctcacaggatggacgagagaaggtgcccctcccttgtctctggccctgatgggcctgacagggcgccggtgggagggcaggagggagacaaaaccatttatatgtatttctggtggacatgtttgggggtccctcttcgcatctcctctgttcttttttttttttttttttggagatggagtctcactctgtcacccaggttggagtgcagtggcacaatctcagctcactgcaatttccatctcccaggtcaagcgattctcctgcctcagcctcccgagtagctgggactacaggtgcccaccaccatgcctggctaattttttatattttagtagagacaggggtttcactgtgttgcccaggctggtctcgaacttctgagctcaggcaatccacctgcctcggcctcccaaagtgctaggattacaggtgtgagccactgcacccagcctctgttctctttttataaggccaagagcgtgctctgaacttccatctcaaccaatttcctagaagaggctggaggtacagaactaagccaaaacaaccagagggactaatcaaccgggtctggacagtgataggattaaagtcagtgacaaattttattatggagctctaaccatgcccagataagtgtgtgacgagaagataacgactcagctgcgaaccggcagccactggggagcccttaacagactgagcccaggatgggccaggaagagaagagggcagtggaggggaggggaggggaggagggctggggaggagttgacgaatcaatcagaaaggctgagggcagggctccctctccattcatgcccaaagaccaccctcagcccagcccacctgggagaccttggatggaactggttcctacatccccatagagataaccgacaccatctgatttgtctcacattccccagtttccatttacactttaatggttctgtattttttttaacctcatcattacctttcagatctaaactcattctgccaacactgaaccctgtctcccatgtcacacagacataaggtatttggagctttttctctggtacctaagtgagtacctgtattctttttaactttctattttaaaacaattttagatttatagcacaattgcaaagttaacccaaagattcctgtttatcccacacccagcttccccttgtgttaacatgttacgtgtaaccatggtacaattattgaaacaaaattaacattgtactgttaaccaaactgtagccttatatttggaattcatcagtttttccactaatgtccttttgctgttccaggatccaatccaagatcccacactgcactgatatttttcttcctatccatttcagattattcattactgctgaaagtaaacaacaatttgatgaaacacatcttaagtcatctctcctttaagcacatgtcccccattgcatccatcaaccttccctcacaatgtaataagaatcacagagaggagctaaacaactgggcagcttgtggtgccatttatgatgtttcatgaaggtaggttctgaggatgacatggtgaaagtggagagaaaatacctccctgtgtggttggccagataatagtcctcaaagacacccatgtcctaatcccttatacattaccttctagagcaagagactttgcatatgtgattgagttgaggaccttgagatggaggagattaccctaaattatctggtaggtcctaaatgcaattgcaagtattcttttaagagagacacttacagaggatagagggagactttactacactgagagggaggcagtgtgaagacagaggaaagagatttaaagatgctatgccgttggctttgaagatgcaaaaggagccatgagccaaggaatgcagccccagaggctggaaaaggcaaggcaatgaattctcctctggaggctccagcaggaatgtggccttgtgcgcaccttggtttcaggccagtgaatcctattttggacttctgatccccagagctgtaagagaatacatttgtgtcgtttgaagccaccaaatttggggtaatttgttacagcagccataggaaaccaacacatcgtgtcatttagaatagtgggcactcgagacatactcattgggcgaatatacccaggtgtatctccttccagaacccactacaccatgcagtctgaaaacgacaatgtaccccattcctgctattttctggtgaggatattaaccagcctactagaaccaaaaagttctttagaattatctagtatatgcttggcagggtctaccaaagcggtacacatgccatgacctagcaatttcactcctaggtatatttccaacagaaatgtgaatatatatggtcaccagaagacctgcatgagagtatcaagggcagcactgttcatagaaggcaaaaactgaaagttattcaaatgttcatcaacaataacatggaaaagtcaatgttggtgtacccacacaacggaatgctacacagcaataagaatgaacaaactacagctgcatagagtgagctgggtatctctctcacaaacttaagtagagcaaaagaaaggagacacaagagagtatggactgcaggattccaggcacatcaagcagaaagcaggcaaagcacatctgtgccatgagaggtcaggatggtggctgtccctggtgggagggaacagaaggggacttctggggcatgggaatgttctatttattggtttcagtacaggcaacatggaggagtttagcacgtgaaaactcaccaagatgtacacttaggacatacgcacattcctgcctgaatatgacagtgcaataaaaagttacccaagaaaccccagtttggaaacagtccctctgccaagcccatccactcccaagctgtgtgcagtggagagctgggcgaaatgcctaacgggacaagcactgcaaatgaggtttgcctattaccataattacatctctgggaatgtgcaaagccctcattttcccttcatgtctataatattgtggggacacaggatgcaattacagcctgaaatatgcagcttaggaagtataaatacacacatctacgtagacctaggtaaaccgtgtgcctttacagagcacgaccgaaccagagcccgcgctcttcctcctgccacccagccgtggagcatttggaccctttgggctgctgtctgatctaagacggcagctctgaggatcaattcccctgagcagacagttttctgaaccagaacccctaatttaaaaattgcctgaagaagcagaaagtaagaactggaggaacagtaatagttatcactgctaattttaacaccaacaagatcttacattcggggaaacgatctcccaccccttttcttatttgaaatatagccttcttgatcataatctgtcattcaagaggagctggatgcaagtggattggcagtaggagaggaaccccagggaaagaccaaagagcaatgagcaggctacagtcaatttgattttgtggattcttccagggccagcacttgcggaggttagagatgccggaaggggtccaggtcttgggtttgtgtgtggtttatttccctcgggcattttcaattcatattcctgctcccctagatattcaggcccatgggcagcattttagcaaatctgggcttgtttcaacaccagcccaagcaggcacagaccagaagagaaatctgttggtggtggggatgctgggggcagcgagcctgatctgaagtggggaggctccctcgatcctaatatacaatatcccaaaacaaagtgaaaataaagtttaaattaccttccggtttcgatgatctaaatcacacctcccttccagaagtgtagataattggagttgactaaattgtgaaaatatctgattttttaaattcattgtgtacaagagtgcccccaccccgccccttctcttccccatgcccctcctataattaacctacacatcagcatataataccagtacccaatgcagtcacgatggcaaccgatagcaagaatacttatggctgtgtacaattcagatacaactgtttaaattccatttggctgagtactgtggctcactccggtaatcccagcactttgggaggccgagttgaggggatcgcttgagcccaggagtttgagaccagcctaggcaatataatgagaccctgcctctgccaaaagttttttaaaaacttaggcaggcacagtggtacacacctggagtcccagctactttgggaggctgaggtgggaggatcccttgagcccgggaagtcgaggctgcagtgagccatgatgatgccactgccactgcactccagcctgggtgacagactgagacactgtctcaaaaaaagaaaaaaaaaaaaacctcaaattgtaatttctctaaatattttcaaaaatagctgcatggaaaaaattagctctgtgcccacccttctctcctgtggctctgtggggtccacttctcaagtgacagcttcataggcttcccagaggttcaggtggcaaagaaccttgggtgatgttttgccagctggaaaccaaatcaagtcaggacaactggagatcaggccaccagctgagaagtgtgggactggaaaagtcaaacctagcaggcaatatttaaattcaaaattgagtatatgtggtcacagcctctctaagcctcagtttctccctgtctttcctttactaagaatgaatcctaccctctgctaatcccacacatcacccaccacaaggatgattttggtttttcagtaaaacaaaagcagaggggggatgggagcagatcctaaacgtttcagaatggtgttcacactattctctcttagactcatggtacctctgcacacagcctctctttgtaaggctgaacaaacagaagcaagcaaccaagcaagcagaaagatattgcagccccaaaaagtaaaaaataaaaaagatgaggataatcacaagaaatattttcctatgagatagatttaccaaaaggaaaaaagaaagaaaatgtctgggaaatgtcgtttttcagtaagattcaagaggacttttttctgaaaaaaatcaaagtaaacagcatctcaaaagcaggggtcagcaaacttttccattaaaaggctagggaagaaatatgcttggctttgaggccacatggtctctgtacaacaaggcttccctaaatagaaacaatatgtaaatgagggagtgggactgaatctggcctcttcctctgatccagagggaaggagctgccctcaggtaaggttgcatgaatggctgaagttaaaacctcactataagaagcaggaagtataatgcaaaaaagaaagtgacagacgcacttgaaaagctttctcagaaataagatgacagtgaggaaaacaaaataagatctggaccacaaaaccagacaccccagtatgtacatacaaggagccctccaaagagaaaacatcacagagcagacatcttgatgagaatgataataataatagtgataataaaagcctttcctgcattgaaaactggaggctatagattaaaagaacatatttaaatccaagggaaaagaaatcaagtcaacacacatccatatcctaataaatgtttctgatgtgtggagaaaattctataaaccttcagacaaagtaaatgaagagattacctacaaaggaatcaaaatccaacgggcctcaggctcccctcctgtattcattgctctaagacagcggagtcatttcaacaactttgagggaaagaaaaatactcagtcaagtctccatttacatttaaggttgacataataacagtctcaggtatccaagggcttaaatattattcccttcatgggggaaaaacaaagtcttaatggcaaatgccgatctactaggggacaaatcaaaattaagaaaccacaggtggaaaatttacaatgttgcagatctatgagcaatgaaaagctattaaagttgtccaaatacttagtataatttcaattataacatagtagaaacgtcaaaaacagtgtttgaaagggatgaatccatgttgaaattatcataatgtaaaaataatacaggtcttaaaacctagatcatattaataaaaattggaagtagggggaggagaaggactaaaatcatactgtttaattcttaacttcgatgctttagggaatgtgggtttaaatgtgctttcaaaaacttaagggtaaccactattaggttaaaataggatgaatactttccaaatcaccaaaagggaggaaagcagagaaagtccaacccacatagcataattaacaagtgataaaaaggaaataggaagtaaatgcatcaaaaagaaaaccaggaagcttaaagacaaaaaacagaaaaacaaggattgtgctatgaaatattaggctgccactaaaaaccatgtttgaagggtacttaatcacacaggggaatgttcacaataaaaagtagagatgaaaacataatatgtacatatatatactctcaactttgtctgtatttaaggttcatagagaaaaaggcatagggatatactcaagtatcttcttttatttaaaaaaaaataattattattattttgtacagacagggtctcactatgttgcccaggctggcctctaattcctggcctcaggtgatcctcccacctcaacctcccaagtctttggtattcacaggcatgagccaccacgcccagcattaataattttttgaagatgatagaatttcaggttattttttttcttgtttattcttgttttatattttccacaaataacacacatttctataattttttttttttttttttttttttgtgagggggaccgagttttgctctttccacccaggctggagtacaatggtgcaatcttggctcactgcaacctctgcctgtcaggttcaagtgattctcctgcctcagcctcccgagtagctgagattacaggcacacaacaccgtgcccagctaacttctatatttttagtagaaacggggtttcaccatgttggccaggttggtctctaacttctgacctcaagtgatccaccccccttcagcctctcaaagtgctaggattacaggcgtgagccatcgcgcccagcctgtaataattcttaaaaacaatcaacattataaaaaataaaaattgtagggtaccatgaaaccaagctgattgttcttcccaggggaggaggaagggccagagaggatttggaaggtattatccagcacaggttaggtttgatcagtcagtggatgctgctgggttggaaactggattttccatctaccagtgcacactcagccctcagtattcttagagcacatgaggaaaaaaaatcactattaagctttaatttccagagcccttactgtgtgctttgtgcaatgtactttattctcacaacaacccagagatgtaagtatttttagcccatttgacagatgaggaaattgatgccagagaggataagagacttgcttaaggttacatagatgggaaggcaagctgccagggttagaaaccagcccgtttgttgaatccctaataataatgtgtccccttccttctggaagttaggcagaacttgtgtggacttcactgctattattttttaatctgctcattcttccctctggcttacggggacacaccatgagggccactgtctcttactttcagctggactatgaatccacatgcccctgattctttcacaaagatgctgcaagccacccctcacaagggcttcctgagcagacatcttattccttccagtccagcatcagtggataaaacagaactaaattcatcgctattccacccaccccaacttccttccttcataaactagccacagagcagaggcccaggagcctgtccaatacatctcagggtcccaagtacttctccccacaccagcctaggaaaccagggctggctgtcagcaaaatgaataaaattcctatgtttgcctaaaaggcaggggaggggagtggagagcttacctctgaattgcaatgttactaggacacagtttgctgtaataataccaattaacatttctccccacttaatagtttctagtacaggataaaaatagcaatacacgtggtgctgagatgcgaaaaataacaatggaaatctgctctggaagagtcctgctctgtctcaccagggaagggtgaggaggtaagtgggaatattaggggagattcaggagggagctgcagagaacctgctagaaattaagagtctgccattgtcttacttctcttctgtcctcagtcaccagctataccaccagaaggcccctgtggcatggcgagatgccgtccggcttggaatgagaagagttgattgctgggtctccactctggcactaaccagttttgtgaccttgcctgagtcagggaacctctttaacctgattccttatctgtaaagtaagactctcagcacctgcatctcaggtgggtgtgcatcgaaatacagtgaaagggctttgcaaaatatgtggaatatgtgaaaaatgtgtcaaaatgctttgcaaaatatgtgaaagggctttgcaaaatgtaacccgagattcacatgtgagggtaggtccctaagaatctgtagtagtgatgcaggtggcacttgccaatacaacaacctttattgatcaacaaaacgaaaattaccaggagttagtccctcccctcagcaggactaaaggatgccagtggtgtaggcattctatggcgcaagctcagcggacctacccttcaaggaccagcacctgtctacaaaaagattcctcagatggaaacagctcttcctaaggacgagtgtggcctggccagaagcccattttcctcaaagctctgatatatttggctaggagagaggatgcccagtcatgctggagaaatttcctggaggctggcttctcttcaatggctgtcactcagagcctgacccagccccggggagcccaggtgccatctatggggagggtgaatgatgaggcactggaagtttccctccctcctttcattccctccaccacttgcatcccccactccccagacctcaccccaacaactggacacacagcccatagatagggtgatttcacgattcagtctagacccccccaccaggcagtgtggaggctggggcctctagttgtgctgcattgggtcccctgagctcccccgaggtgtcctaggagtctttggggaacactgggaaaactgagagggaagctctgaaaccacttcgtacccaccaacatacaccctcaacctgaaatgatttttaccagtttaatgtttggcttccacataagattttatacaaagaaaaggttctgtctctaaactctaaaaagttttacaatctttgttcctggggcttataagaatccagggaaaggggaccttaccttggtccttggattggagtgaagtcacctaaggacccatccaaataacgaccatgttttattcctagtgggaaaatgtagtccaacagtaacaccatccaaaatctctctgggcatgtggctaccacacctaagtacaaggaattttctgtttcttggaaaaagcccttcgtcctctcccatgtgctgtcatcccaggatcatggggcctgggaatgtcagttcgggccagatgagttcaagtgagcaatgtgttatcacaaacttggaaggggagacaggaagcaggtttggtgggaaggaaagaaagcagaaagacccagaggagaccacttttcctgcagagctggaggagagagggactggaagagcccacagagacccatctgtgtttttcaaaacgcatttttagaaaaagaggaggctagggaaacagagacacctgcttagagccagagaacattcccttcgaagggattcaaaagcacatgggcaacacaagccactgtgccaggtacccacgcaggtcaggggcctggtctcaacttgggaaacatcaagaggccagcaagctgaagcccctcagctcagcttctcccctcagagacgaagaagctggaagccatcagccagctaggcagaaaggggtcatctatcattgcttggctctgaaagatcttagagcaagaaggatccaagagagagggccagtgtgaaagggggaaatatgcaggagggacaatgtctgacattttttggaggctgtaggtctcgggcaggagttgtggctgaccacactcagctcagcctgagcccaacagggcatgatgaggacccgtatgggctctggagccaggagtcaggccctgcattcaaatcctgcctccagagcctgagacatgtggccttgggttagctctttatcctgtccggacctcagtttccttgagcgtccttagcaacgataagcatatctactttgtagggctgttctgagggttgaaagagttagcagatgtaaatcacgcagagcagcatccacacttggtaagcctgcagtcagtgttggctggagctgctgtggggaaacccccttcacgctgagccccattgggtccagccctcccaagatgcaaggatggaggtgggtggatgaagttcccctggtggcagtgggatgtgaacagcacccccacagcaattctctttatgtgtaaccccctccctcgggggcagtctctccacttccatcttttctttttctcttctctctccattttcctccttttttaactttttaatcactttctaagttctccccctgtgttcttttagcagatttgcagagccatctatcaagaagcttaaataatgaaggaccatagttgcaattgcctgttcacaggctcttgggctttctgggtgattagaggagactcctgctgggggaagctgcctgactagaatgttttctaacctcttagagaagctcccatggctgctatgccttagctgccctccatgatcattagcgactccctaagcagcccggtcaggtaaactgcacactacttgctccacacatggaaaagcctcagagggactgagaagtcactggtgggatggggactgagagtccacagcccctgaggctgcctgtctcccaattcatcaagtcacaaaataagatgaggagctcctagcccacctctctggggtcatctccacagctctgcagagtggctggtcttggggccaaaagaggtgcgagggtaattgacctatattggggggtgagtttgcattatttttccagagctgagtccgtcacagtccctcacagccaaggtgacccattaggcaagagctcagggttccgcctgagaccgtgggccagaggtatttgctgtccccctgcaggggacccgtgaaagaccttggccttgttactatactgcttcatacaacttgatcgtcccatcctaggctctgaaaactggtctgctcaccaatggtactcaccaaaaacttctttgaagatcccacctctcagctgggcatcatgtcccagtgcatgtcctaagcacatcctgtgccaagcacattttctggtcttcagttcaaaggtgggaaattaacacacagagagagggcaaagtaactgccaaagatcacaaaattaaaagacgttgaacctagggacccagactcccagcctattcccatgatggcccaagagaatattcccataggtggtatgggagtaagttgtttcggtctttctaatacttcaaataacctcattattcaggatggtggtgtccaagtggtgaaacagaccatccctggatggcagcactaccgaggaacacacttcttggctgtgggatccttttgctggctcactttggaatgccaacatgttccaaatctctccaacttaatgaaacacctgtcccctctaatgccatcagcagtaactgcacatggctctcacacttgcacacacatgcacacagctccagctggctcactgggtggttccttgggtacatctggctgcactcctcaatccatcctggtgtgaccgagttggaataaaccccccagtccttagctctctggaataagagaaagttttacaaaaaaaccctgtaatctggtatcaactgggcctaagataagcctcaagtaattacaacagagatagacaaatcgtacattcaaactgccaaggctttaaatgacacacacacacatacacacaaacacacatacacacacagacagatggtattgttgaaaacttaaaatataattcatatttacaggacatgatttagaaattgtccccagttactattttgtaaattggtgcttatacatatgccgtatgtattctatatcaataatttttcctaataatgttattaccttgcacactcaatcccagtgaaccctgaaggaaaaaattctcatctcaagaatccaaagagctgaggtcaggtggggaagtcttagccttatggtgaaaaactagaacaggcagtcgaaggggcaggcaatgcttctatcgtccctttttagaacactgctctgtggccctctcactcttcctgcagatgtaggagtagaatgagatgaggagaaagagagaagaatgctttgaaataagttatccaaaatggcagacaggtcctcctccacttttccaggaacacctccctcccttcaacacacacaatatgcacacgcacacacacacacacacacacaatacacacacacaatatttatgcacgactgttacatacacacatttgaggagagaaggaattatgtaacacatcagctgttcattttcacaggcccacttgaaatggagctcaatcttataagtatagaagtctggggtgagcgtctaggaatttcaacaggcactgagaaaatgcccactctgaagcacagaacatggcctgtggaatgctcgaaagcttccagcctggagggcgacctgagatgttagtaccaagggcttcctctccagagcctcagtctccacatatccctcagactaacccctacagagctgggtatctcgtagggaaactaaattgagctcggaaatgcacaccaaccaaaaaaaaaaaaaaaaaaaagaaagaaagaaagaaaaaaaaaagaaaaaagtattttagatccaaaagggagcagtggcacaatgtcacgatgtaatacaagggcatgggttttggagtctgtggatgaagaaatgccttacctccctaagtttctttagggtaaattggagcaaaaatcctcaccttgcagggttgctgtgagggccttagaccatacatgtgtaaagcattgatagcacaaagttcaccatggagtagttgctcactgttttctcattttccattccctctcttcctctccccagccctgactgattggaagtcatttccgctttttcagcagacccagcctcagctgatgattcacctggttgctggaagtgagttctgtttctcaaccctgggattgaagactgactttcaataatttgattgtggagttcttagccttcctgaaacagggctccatttggatgctttgcaaagccaagcagagaacatgtccttccagtgagaaagtagcccatgggtcttcattccaatatacctctgtggtttctcaatgcattcgtccattctaatttttctgtctacctaaaatctccaagaatagaaagaccactttttccttatttgatcatcacatactgcctaaaatcacatcttgctcaacagtaactgttaagcggaagatggcagtagtgccaggaaattatcagaggaaaacagaaacaaaacacaacataagcctggtcagtcacagtttcccttgatcagtaaacaaccaaggtcggtggtgactcccctttgggagagaggacaccatttgccactgtcacaactggccctgtatactgtcgggttcagtggcagatcttctcattgggttctaatagctgctccacatgccagagccaccaaaagcctctctgccttgtccagttaagacaaagatgaacttctcaaaagttttttatgcccaaagctcttccaaaaccaaggggaagaaactctgtatataatgaaacctcaaataaagtcaatgacactgagaagtttacagagggctcctctcaataaatatccaagagggagagctgacagttgtcttgaccagtagagttcactgggctcagaaacaagggggggcctgtcctcaccccatctggcttggatcagaggacctgaagtgctctagttgggaatgatggcaaagtttggtgggattgtcagtctttgtaaaaactttctcaccttctctttggatgtgggcctctcagtagacctatctggtcccaaaatgccatcccccaaacttcacacctatccccaatcagttttgcagatgttttagaggaatctccacttgtataggtagaatcatgccccctccccaaagatgtccacatcctaatcctcagaacttgcgaataggttacctaacatggcaaaagggacttggaagatatcatgaagttaagaaccttgaaaaagagagatgagcctggactatccaggtaggcacactcatatcacatgagtccttaaaagcagagaacttttcccagccttggtcagagggagggagacttgactatgaaagaaaggccaaaaacatgtatcactgctggctttgaagacggaggaagagaactgtagctgaggaatgtgggtggcctttagaagctgaaaaagacaggaaatagattatctcctagaacctccaaaaagggatgagctcctggaaaggcatgaagacctgccagtgcctggattagcccagtgagacccatgtcagatttttgacctatagaactgtgacatagcttggatatgagtccccgcccaaatctcaagttgaattgtaatcctcagtattggaggtggggccttggggggtgtgattaaatcatggggtggatttctcattaatggtttagtaccatccgcttggtgcggtttttgtgatagtgagagagttctctcgagattttgttgtttaaaggtgtgtggcacctcccccatctcttgctgctgccttatctatgtgacgtgcctgctctcgattcgccttctgccatgactgtaagcttcctgaggcgtgcccagagccaagcagatatacaccctgtaggaccatgagccaattacacctcttttctttataaagtatccagcctcaggtatttctttatagcaatgcaagaacggtgtaatacaaatagaccgttgtgtgtgttgtgtgaagttggtaaatttgtggtcatttgtgacaacagcattaggaatggaatacactgcccgttcctggtgaggtgcccctcttccttcatcccttcatggcccaacttctctgaaagtgctgctggctgagtcctcccatgggggcacctcacctgttactcccagcgatcaccttggccctgctcctcatcagtctccttgccaggacagcagcagcagcctgttctctcctctctccagtttcaaatggccctggttccttaaagggccttctagatcttgtttctaatccctgggaccgtttgagttccaaacatcacttgtcagaaggatagaccacagatgccttggagtgggaggaggaggaggggcgctctttcaaactctggttcccccttcacccacttccccacatatggacttgtaaaacaccagccacctcgctttccataccaaacaacagtacacgcaagaacaaacaagcagggccacggcctttcttactggaaccaggtatgctttctggcttgtttgttttctcagaatttaaaaatacatcgagtgtgctttattgaactgcccaaaaagggacacacctgcagcacctcataaacttgtttgatcaaacaaacaaaagccaaaacacttttctgatggagtatttctcggaacttgtactctgcagaaaacactctgtaaagtttgcttgtaaccacgctccattatcgtctacaagcctcagaagtctgaggaatctgagcccaccctgacctttctttccgattcaatctgcatacttgctttttgatcatgaaaataaaaaaattttgccctgatacttttttccccatatcttcatttatttttcttggggcctagcaaggtcttttggcaagaaaatccagatcttttctcgctcagaaatattttccttattggatttggcttgtttcttaacttgctctggtcagttgcacaagagcatcaattatctatattttgctggattcttcatatctaccatggcttcccttatgattatcatatttttaattccctccttgggcacaaatgcaaatctttagaacaaggaaactgggagctgaaaagagagaggtaagaatttcagaggaagaaggaagcctctctcaacagacagcagcaggggcaatggcaggagccagggcagtgcacgggacacacccccagccgaccgcctcccaagcctgctggggctatggaacccaattccaggctgtcagcagagacaaatttagcaccgatgatctcatcttgcagaacagccccagggctcagggaaacatcactggaaaagctgggaagtggacgtcactgctagtcccataatgtaggtgaaaggcacagggcccctctctcagctcactaaaagggagcaccaagaccacaaggagcaggtacaggtgatggtgagggcgtggccagcggggaacaggctggggggtctggggcattactagcctgctctcctcagagtccccacaaccccaagcacagtgagctgaagttccaggacaggtccacagatacggacacacttcgtttgagatgagtgacaaacagtactaaacattatcattgtggagttacagcttctcctgtcaggcccacatcaggatgttacgtggcagagtatttacaaatgcagcagcaggcagaaggtagagagagtgggggcacattccctcttatttactgaaaataagaccaaatccctgcaaaggggggcaaggatcccttgtctcttgcagtgagtcagtggcagaaaaagatgagaacttgtcaccaggtgcaaaccccaaatcttgccactggctcaagctacctctgcatggctctgaagttggtttttctggcttccttagccggacacttttgctggtcagtttccctgcagtttcttagtgtgtctggtggtcagattctccctcctgttcctggagcaaagaggcctcagcggctcccccagtgtttcccaaaagcagtcccaggagggcagtggcggcaggtcctttgctgggatggggacccctgtctcctgcttctgtagctaatggacagcatcccatgaacctttgtgaagaaggaaggtatgaaaataactaagaaaagcagacttgacacctctcacaaagaaataaatacatttctaaatgtcaaataaacataggtacttacagaaggcaagaccctccaaaaagagtggttcgtatcacactgctaatggggatggatagtgatggcaaataaatattgtcacgttaaaaaggccaggtttatattcaagcacaccagggccactcctgtgtcagtttcagtcatattagagaagatcagctccctgagaacaagggctaggaagctaataaattccatactgggaagtgccatgggaacgtaatgaggggttatcagagaaattagaatgtgcaagactccgtctcaaacaagaaaaaaaaaaagaaattaaaatgtactgagaatttggggtggccaccaaaataaaacctctcccacccaagacagcatgaacattattgtggttaaaggaaagaaagttcaacaagcaacttagaacagaactgacagcatctcttcaagtgaagacttcagagaaagctgcaaacagaaatgacaaaaaacaaaacaaaacaaaacaaaacaaaaaaaaacagggcaataaacacctagaaggcggcattagggctgtgcagcagagcccaaatgcaaaggcagcattagcagtggaagcaaagaatccttacggggtcagacccacagggctgagccaagatcagatctctctgtctcacacacacacacacacacacacacacacacacacacacacacatgcacacaccagctgcagcactagggcgtttgggaaagacacaaaattagtttagattgtaaaacatttatcctgtagaggcaacgtgagatttttttctgtagttcttttaattaaaagtgagctcataaatcaaagcccctgtttccagcctgcaggaggtagtaggagtgaacctaagccttgcagagctgagcctgccccgcccatcctgctttccatcacccaggttattcaccccaattacaacaccgcacatgttacagggactcagtgagtagccaagggtggctctgatgaattacatctcactttcttcactggggtctccgaagttctcccaaagagatattgagcacatgtacacacacacacacacgcgcgcgcacgcacacacacacaattaaatcctatcagaactggttagtgcatctatttggagcatctgctgtttcccctgcagagccccacctctggagaccttcccctcctctgcatttctaccttgcctgggctcacatggctgtttgcatttgtgagtctgaagactcttcttagaagttttttaaacacagaaagtcttatggatccttgccatcttcttaatttgttttaattttttcctcctgggtgaattaaagaatgttctacagacatgaagtctcactaccctcagctcattcataagagagatggagggagggtgcatacattaatatgctcattactccaaaggtgacatacgtgtggataaagaatttgtcccaaaccagaagtgcagccagaaacaaagttaagatttcctggatgtcggttccaagattttaagccacacccaggcctggctcttaacaatttagagggatggctggccccagacacagaccagggcagacacctgggcatgaagattgcaggagtcctaggagcagtagtgggaggcagcagggtggcccacagtagctcccgttgcccctcccagccctccttgggattgacagaatggttgccgtgaccagcggaggaagcacattgatttcccattttcaagctgccccccagctccaagcatcttagagctctttatgtgcccatactcacatgtgttcacagttttagtgggaaatgaggacaaagaaacggaaccccctctaagagagaaaatgttagagatagagatgaacttcatttcagcttcctgcccggtatctacccttgatgccaggaaccgctctgtcactgcatcccccaatcccactgcttccttctgcccctgcccccgcacagaacaagaatccagacaaaagcacaggtcaagggagaaataaaggtcccccttcccctgacccaactccctcagaaacaatcagattcaaggcagagagattaaattatcactaagctaattatgggactcacacttaggctggctgccgggaagcgaggtcagcaagcaagagacattaacatgcaaattgaaggcagatgcaaggagcacttaaaaaaaagcaaccgggagactgattccccccacacccagaggagaaagaagccactctggtggttgaggcactgtccatctgggcaatggtcagggcatttgacagctaaatagctctactctgtcatcatcctgaagccaaagtgggcgagtcagaggtaaactgattaggtggtgtgccgctaatctcccagagagaacatgagggaggtggatgcaaggcagagcccagcgggagcagccccaggcttgagtgcagagaaggctctgccggttcctatgcttgcatgtgtgggtgcctccctgtgcgtgggtgaacacaggtgtgtgtgtcagctgggtgtttgtgcatgtttatgactatggatgtgtgtatggagaggggatacagaatcaggcatgtgtgagtatatcttatccacctgaaaatagaaggtgaagagcttagacagaatcaaagtgcccctcctagcataatagccaccgggcaactccttaagagctttctgagattgttaaggcccctgcaattgctgtcaccagctcagccatgaaaatacatattatggtacccagttatggatgactgatgcttccccaggcatcatcaatatgatgcgagtttaagacatgttggccaaaaacttggcagtctacaaaatgactttgagagataaaaatcaatgtttttcaatgcaatctgcaggatagcttcctccactcaggattctgactctgcaagtctcttgccttttccagagaggagcaggttggcagggaaccctgatacggaggcatgtgagcttgttttaagtcagtagacagctttgggttccttgtcctgagaaatggaatttaatgggcaatatcctgcctgtgtccagagtgaatttttggaacccatggttggcaaggggggttcagaggggaagtgggggaatctctggagcttaaattacttagggaaaattaatttggaaactttatttaattataggtaaaagaaatgcttccataaatttgggtaatttaattatccaagagacatctgctgaacacaatctaatcattgtatttaagtagaaaagtgccctcactcttaacaaaactaattttggggagatacaaacattcagagcctgactaatgaaagaaaaggaataatttcagtttcagttttaggaggaaaaaagtaaatcacaggaaaatcatctgagagaggatttagttttttaaaaatcttcaacattatatctggggttgatgatataaaatcagccatatcctatattttttgcacatcttctccaatactaagcaaagaagagatcacaagctctttaagtcaagaagtgcctagcgcattttagatgaccaagaagatagttcttgactgaatgttgatgttcacaaaaataaaccttatgataaactgtatggacagaattatccacaaaatattcattgcccttctctcccacctccctgcatacatacacaccagccccctccccaggctccaggcagggttatattttccacaccattcactttggctgggccaaaaaaatgggagtgggccaccaccaagcagtagctttaacaaccacggcacggttctgccatctctcttttcctttggccatgagatcaacatgtcccagacaggggctgcccttccaagtctcccagataaataacatggagcagggctgcagccagcccagggtgcacatgaacgtgagttgaaaatagccttcgttattgttgttgtaagccacctaaacttgggggtcatttgttactgcaacataatgtagtctaagctagctgatacacacacacatgcacacaggcactagaagaccctaagccccagtggtccatcttcaaatacatttttttattcagcatttgttaccttcgggcagtactgtgggggcaccttcagtttaattggaagaaggtataaacacactggggaaatagatccagctatattaatgaactgtattttctatgtgaagaaaatgaacaaattcctttcagaaaaacatctcagctacaatgttgaaagcttctattgcctataattttggggtaatcaaaatgtggctaaataaaaaccaaatttataaaatggatacattatgaggctattaattttagaaaataattctccattttagaaagagattcattagtttcctacaatgaatccacatttcctacccaaaaagagataaagaagcccacagcctggttgaggcagggaagccatcagtactatcagcatccctccagccatggcccttcctaggtcacagagcctctagggtccccagctgccacactagctctacttaaggtcaacattgtacaagttcaggcccacctagggcataagccaacactgcctaactaaacctccctggatctaagaaagactcattctctaagtgaggtttaagatgtatctttctctcccaagtctggtgtgtctgggaaaagacccagaacaactttgatcataaagatgaaataaaataaaatattccaggtatgctaacctgatgcattgaaaatatggttataattacatgcaacatttaaaaaaatatgtttactcatcacaagtgatacttgtagtagaggaatcctgtctgagacagaaaatcatggataagttttatgctctgtgggggaaggaagaacaaaagggacagagctgaattatcactggaggaaatgttggtctgttgcagaaagaccaatgtaaagaatgtattgacttatagatttttaaaggtagactgaagatatctaatcattttcattattataaaaaaccacgatgtatataaggcacccatatatgatcttaggtagaatcctgcctagaggccaaaatggcaatttgtatctgagactcccatgggaatacctggaacacagtaggattttgtttaagttttggatgcaatgatgagggcaggtcgtcaggtggcttcaacatcattctggcctctcaggtccaacaatacctgggaacactcagatttagccacctccagccccagaatactcatatcttggtggggaggtaaaagtggttaagcagaaagacaacccatctctttccttccaacctccttgccaccaaagcctcagaagccttctccagcaggggagaaactttttggaaggcagctcaaaaaagtctcatggccagacatggtagctcatacctgtaatctcagaattttgggaggccgaggtgggaggattgcttgaggtcaggagtttaagaccagcctggacaacgtagcaagaccccatctctataaaaaatgttaaaaattagtggagcatggtgacacatacctgtagtcccaggtacttcggcgactgagacaggtggatcgctagaacccagaagtttgaggctgtcatgagttaggatagcaccacttcactttggcctgggtgacagagcaagaccctatctctttgggaaaaaaaaaaaaaaattcccaaaaggaaaactgggactaggtgaggcactgggagtgtcagagggcagccccaaggaagggagagcctgtgaggtggggtaaaaccccaaaccaacacccatttctcacagatgcaacccttggagagcctttcctaaaaggactcaaaagggaaacccaggaagccaacaaaatagagctgggtccccatgcagctgtgccataacacagggcaaggggaatacggccttccacccgcaccttagtgagcccgggaccccacaatgagcaagggagagaatgccgcccggcagtgggtgtccaggagtggttttggggggaagaggattgctctttgtagattctttgcattcttttattaaccatttttttgggatagggtctcactctgttgcccaggctggggtgcaatggcacgatctcggctcactgcaacctctgcctcctgggttcaagcgattctcctgcctcagcctctggagtagctgggactacaggcatgtaccatcattcccagctaattttgtttatttttatattttagtagagacagggttttgccatgttgcccaggctggtctgaaatccctggcctcaagtgatccaccctcctcggcctcccaaagtactgagattacaggcatgagccactgcgcctggcctctttgcatttttttaaaaagaggtttgactatataaagaactatgtacacttctgaagtagtctccctaacctcccattcaatcatactattaccccaagtccccatatctataaagaaatagcaaagccaacacggcctcaggccttcctaactccacatcatcctgagcaaattaattggtcaagataacatttgtgagcacaccttcactaagttaaaagtacaatactacagagcgacaggaaggaaaaggtaagaatggagggggtgaaagtgaggaaagtaggcaaaggattgtgagaagagccgagaagctcaggtttgggggatagacactcagaaggaaaaagaaggttggatgtgctggtggtgacaagtgctccaggtgactgggagtcacaaggagactggctaattaggccctccattccagagcacttgcaaagcaataatgacccgtgattaggaagaagctgtcatcctccaaatgggtcaagacagggaccgtggataacccgtcacaggaaaaatcacccagaaccacagcacacagtcccacaggctctaggagggacaattccggtgagaaaccaagacaaagatgggcccagtctgtcacaggaaaaatcacccagaaccacagcacacagtcccacaggctctaggagggacaattccggtgagaaaccaagacaaagatgggcccagtctgtcccaggcagcaggccaggggtaagtggaaaagcacagctcggctgcctcctggaaaacctcctcccctccctgtggccacctcccactcggccacgggatccaagctccagcataattgctctcagaaggaaattgcccgtggaggcaggttggtgatgtgagagcagccatggaggcaggagtcccgtcgtttctaaggtgggagcctcttccttggtatttaaatttagccagggcccttgaggactcgaaatgtgaaggccgaggcagccagctgaggctgaatggctgagccagggacctgagtcctcagcatgtcaggtccacttccatgcaagcaaagctacaggcaaggggctgcagaagggtggatgagacaagtccagttttgtttttcttggtgacaagggtgagaggattagaactgctttaggaagctgaatctgccatctaggatccatccaaactgattttcctgtccctaaagtgctcccctctttaatccatcccaggaagatggattaaagaggggaaaatcagtttcaaccgccctagcatggacatcagggcctgagacagggcagagacagaacagagggaatgaaaggagggttctgagcaacaggctccagggtaggtaccagaggtccagccaccacctcctccctccatcagggaggtgacctaccctacagcccaggagccaggccttaggtagagtctgtgatattactcgatacgggtcccaggacaacctcggattagaccgtgtgacctctggggagttacccaaccccttttctcctgggtaaaatggaaggtgtaacatttaccccacccccaaaaaaaaacattgaggattacatgtgacaatcaatgtaagtaacatgtgaaaacatctagaacaatcctggtgcctacacggtgttcaaagctcagtagttccctctgcaccacctcttttctgccagccccaaacactaaggaaacgaccccttcctaagatgctgggtgcctccccacagaggccaaaggcagaagatatggattctccatggccacacagagttctcggcagctactgattcaaaatctaagcatctcttgtccatcatcgagcactgccctctctccagatgaacggagcacctgggactgcctgctgagcccccaggcctccttgttgaggaagtttcctcacccctggtcctgtgggtgtggcgactgcttcacagcctcctgtttatcctctggattctctactgtgtttgcacaatcaaagccacaagccaaaagacaggattcagtgcctgggccactggtgttcctgaggaaggccgtgtccttttccacactactaaaaatgaacttgaagtttgaaagtatgggttcaagtcccctcaatggctgagaaacaaagccctcatgtagaaggcagcctccaacatagcccccagtgatccccacctctgggtattcatgacctacagagtcccttcctggagtgtgagctggacccactagctggcttctaagacataatacagcaaaggggatggggtgtcacttctgaaaccaggtttcaaaaagacaatggcttgcaccttgctcagcctctttctcgcccccatctctcagacatcgttctagagaagcctgctgctgcactccttgttgtgcacgtggcctcatggaggggcccacatggcaatgtagggatctctcaagtgaggacctgaggcttgccaacaaacccgggagtgacattggaggtagactcttccccattctggtctttagcagtgggatgactgcagccccagccaataccatgaccctaagccggaggacccagctgagccatgcccagattccagaaccacagaaactgtatgtatgataataagtgttgttcaaagcctctaagttctggagtagttcacggcaatcgataactaatacacctgtgtctcctgggccaggagagaaggtatggagtgagtgtgggagcttcgagaaactttttttttttttttgagatggagtctcactctattgcccaggctggagtgcaatggtgcgatctcagctcactgcaacctccgcctcctgggttcaagagattctcctgcctcagcgtcctgagtagctgggattacaggtgtgcaccatcatgcccggctaatttttgtatttttagtaaaggcagggttttaccacgttggtcatgctggtcttgaactcctgacctcatgatctgtgtgcctcagcctcccaaagtgctgggattacaggggtgagccaccgcgcccggccgagagacctcttttaaaaagtcaccatggatgcttctatgagaagccagaactgctgcgaaaagcagcaccatgacatcatcaataagcaagcccagtggacacattcccaggaagttccctaagaacaagtatggactttcagcagaccccaaatcagaacatcaactcatgggctgtgaattggtccaactgccactgccttccccatcagagtggctgaggaaatcatagcaattgccggtaacaaagacctcccctggctctaccctcgctaggagtcttcactggtattgacatcaagattctattctcctatccagagtctagcaggtgtgagcccagcagtaaaaggaccacttatggttgggggctcattccctcttcttgcctctgcctcctccctcttcctctgtacatcatgtctttcatcctttcccatctttgttgtcttggttacatggccagactcctaatatgctgctagttttcattttaatgatatgtttttgtaaagcacaatattttacttcaattgcatgtgtcactggataaattcctctagtgcgtctgacatttgtgtatcagctgactgaatgcgctctatgatttggggtgtttgtgcagcactttcttcaattttaatgtgtttgcattttaatttatgatcaggatctttctataccaatgtgtgtatatatacacacatatgattcaaaaaagtggcacacgtatcaataaatcttgaattggcaaagctcatttaagactatctctttaaatcatgtgcactagcaatgatcacttggaaaacagaatgacaagtgttcctgagaaactctttgctgggatttcaatgtgtgtttcaggaggaagtcaggaggagaatgcaacaatgcctagctattggctgcagtagaaatttcacgatgagaacacctccccgggtttattcaggtcagcaaggagggaccacttgagatcccccagggatgtgcagggaaggtgggtgggcccaagggcagaatagtgagaaatggaaaaagataagaaaagagggccagtgtggccacacttacatcaaaagggtgattgagtgagggcttaatagtgttcaagaatataaaatatgtccaagaggatatcaaccagcttagttgctcttttagtcaactgagtaaaacttgggaagaaagcttaaaacatagcagaagagattgaaacaaggtgggaggaaggcccatgagaagtggatacattggtctgaggcaagatcagtctgaagggccagtcttagaattcccaggctggaaagactaacgacagaatgccgtctgtctgtggttgaacgtgaaatcagaggagggagggtggcacgctggcacacctgtgggatcttctgcctggagcccttcaacctcagcctccccttcacacaacccacagggtaaggtctatgcaggtttaatatttgcaaaaccagggatggaaaatgcagacacaatatagcaaatagagggtcttttcctgtcatggaaatcggtcagccctgatgcttctgcatttctttccctttgtgcttgtgatcaatcacacatgaacccatggcagcttgggctggagaaacatatagcacaacagaactacctgaccgaaccctgtatcaaatacatatgccctctgccctaaccacatgttcctagtctatttggtgttccaacattgtatctccatttgatttcctgacacttccatccatctgcagggctttctgtgctatgaatatttatttttagttaaagtggattcaaatttccagagtaattttaggaagaattcccaggtacatttaggaagcaacaaagcagaggctggactctctgatctgatattgctttgtgacttgagcactgaagatacacacacagcatctgttcctgagaagcaatgttcgccccaggtgggtctccctccactccaatccactcctgggtgattcccccttgtggacctgtgccgaaggactagggaacaaaagcaaattaattttaaaacaggcttgagaaaaaaaaattaggaagattaaattaatctacatgacaattcccaataagaatggtttttgtactatatactcctattgcctcttcatgggaatgtgcacccagtacctattcagagaggctggtatggattagtctgtgcacagacacatggatgcatgtcccgcaacaggctaatagcagggccagccagagttccgcttaaccaacatccatacagcgctccacccccttaggtgtgaacagtttaacctagcaaaaacatccagggaagacgcaatcaccagcgagaggagcaatcacacctcaagtggaagtttatgatgttttggttcacaatgaacattagtctctcccactaatgtcaggcagtaattcaccactgaacagcagccataaaaatgatcgcttagtgaaaggaaagcaagaggcagagaaagcaagagagggaaaagattccagcagaaatattcaagcaaagaaatctcgtgcttctgagacaacactgagctgattgtcccaactcaagccaaagatttaggtttgcttggccctaaagccagtcaagatggcatttgccttatgatttttacctatagtggaaatgttaacagtctgtaggttattgctaagttcctagacacctgcttatgactgtagtatttataggtcatatttcttaacacacatacccttaaagctcaccacaggaagaggctgccaataccatctgcaacacacacacatcagaaaacatcaaagacatctaaattggcactttcctcacctcctttccccccgcttcatgtgacgtgtgcactaaaggagtgaaattacggtcgtcaaagacaaggttgcaaatgattgggactcatgcctttcaagcaaaataaaaagtaattttgagagcagcccacggatagctcggtctagctcctggacccctgaaacccacagcaaacacccttactcttagcatccccccaagctctctcctgcccacctacccccatttccagtctcttgtcataccgtaaagaactctgaaaggtccttgatacacacaggagattattacagggctcagagaaaccaactctgtaattatggctacagtatgatttccattattctcacgccctggcctcagtcacttgcaaaacttccagcaaaatcctcctgcagctccacaacttgtcacggctgggcctctgcccaaaaggtgactgtggtcctgataacctctgggaaaagcaagtcagaattattacaaggaaaggggagtggtgcttagtgagtgagtgggggtggggaattctattgttcaagaaaaaataaataaatgggccacttttgctttttattatttcaaacaacagactcggcagcccagccttcctttcccaactcagactgttcccctgggccagctgtgctgagtctgcaggcacgggagccgggcttgagcaaaaccattaaaaggctgccactccaagcctgcagagcagaaagtttggccgccccagtggcctggctttccccgggaggaccgaaggctcattccccccaactgacccttgcgctcttacctttcaaatgtttatgcctcaccagccccaccactgctctggaaattagatagaatatcccaggtggctgaaacagaactgttcttatatcaacctaccaaagtaaaagatgggaatgccggccgcggtttatgaagccccagcctcttggtggggtattgcctgtgtcacctgtcactgcctgcctgaccgactgctggactctgtccttacctgcctcaggagggttgtctctgagcgccttgctggcccaggctcctgggggtgtcctgatcccaaactcatggtgctgcacttgacctccctgtcggggaacagatttggacaggcttccacaggcaagagagtaccagtcaccaaatgcctcaacccacccttggacaaacagcacaaaaatgcaagttgactatcttgggtttacaatgcagccatggtcaggaaacaccttcctttttccaagagaaaataactgttttgttatgtgcactgaactctcaatgttcatttcattgataacattcactgcccaaccagctcagacaatcacacacacacacaaatcctcatccagggtctactccatcctgccagctagtaaatggtcctctggcagctggtaggaaattcagcgggtaagactcttttagggcaaggcaggaagttacttctacattgcactgagattgagctcaccggagaaaagagttaaagcatcccccatactgcttgctgacttatttactcttaatggtgctcattcacccattgcagcaggtgaagcaggtctcagtgcatgaattgtacacagtaatgcccccggtatttagaattcacttttccagcagaccaaatttgccaaatcctactgaagaatcgagccatctgattcacctgcccaaaagctcatgtacttctctcctcagtgtggactgacgcgtgtcagacacaatttcagagtttggctatctggtttcctagcccaccaaagctggaagctgcagaatgagggaggaggaaaggtgctgaagtcaaccaggattcctggcagcaactggaagtgatgagtggccaagtgcatgagaggaagacccgggaaggcagcaaaaatcagacacaggagctgtgtggggataacatgcccatgtctcacagcgtcttccctgggcatccacaaaactcagttcaatatgtgaacaaaaatcacgaggagtctgaggcagcaaggaaagattccattgcgcttaccattttcttcacagaacggaggtatgaaatacaattctttgcagggaattatgaaatacaattcttaaaaatgtgtacacaatgattttgctgttttttagttgtgacactgaaggcggtccactcaaattaggcagttacttcctcctgggcagcacctgctgtgtggtacatcatggacaccattcttgcagagtaccatggtgtttccccagtgctcattgttttctttcccagtcattacccatagaattactccacacacaagttcccaagtcacaaacacactctggggtgcccgcctcttgtcctccacatgctcccattccagacacaccacctgtccgcagagatgccaacagaaatgattgctgggctgttacattgttggatggtaaaataggcatagtcctctaaatatgcccagaacatttcctcttgaccatccagagctagcagccagaaatacagcaaagggaaatggagggattaaggcttagtctcaatctttactcaatctgaatcacacaatgtccagagaaccccaaaagaagccaaaataaagcaagcaagagctccacatggaatcatcaatatttcctgggaaaggactaaaatgcaattattggccaacaggaaacaggacctcctgcctaccaccttagaaggacttttaacccaatcaagaagggcatgcactatagggccagttccaactcatgagatgagaagcctgaacacaaaacatccctgggcggatgactgctcccaacacagctgatgagccaagatcgcccaggactccagaacctgccagcttccggaagatgcaggggaaaggtcaggtccccagatcataccatctgacctcaccagagcaattttcatgttcccattgcacccgtggttttctcagcccacaacttggctctgggccccatttgcaactttaataggtctgcactttcctccatctgttccctgaatgcattccagatgatgcagcagccagaagggctggagcaaggggaacaggcatgtcccttccccctgcccaccttccccaattgctcagacctaataaagcctttgccttaagggcacaagcccaaattgaacacagcatacaccatttagaacaacactgcaaggctggtctgacacctctcatgtgcacaccagctctagggaggaggtgaatccacacactcaccccacaacctcagcacagaggcagagaaaggacaagatgatcatcatgacctcaacagcagcgtatctccttagctcaaatctgtatcacctgcccacacgcccaagttagcaaaaagatgtaagataacatccagcccaggagggacagactgtcttcacagtaaccaaaagtactgcacctcattcctaccttcttcagcttgccacttttggtgcccacaaaggccagagagtggttcttgtagacatatgcgatgacagacgtcatgcggtccctgtcctccgtgaagacgggaattccacgcaccatgtcggacactcccaggggagcattcatgtccaggccacagaagttatcgtcaatggttaagagctgcaaattttaaaaagagaaaaattagaagggagcgtcaaggaaattggcagagatattaagtcaggaaactatggaggtagaagaatccttagagatgaaacatctggtaacaatccctcttttttacatgaaaaacgtcactccagagaaactaggtgacctgtgaagagtcacctgagtgggcaggtgcagggacatggcagaaaacacaggtccgcaggtctcctttctccataatctgtgtgtctctgcccctcatccaacccctcccagcgccatcttgggagctttgtccatcattattatcatcatcatcctcacgtggaaaagcctcacgtggaaaagccctgggtcagcccagatgagcaggggctccaggccgctctgctcaggcacaagagggatgtggtctccgtatctatacacaaagaggaatgtggtcttcgtatctatacagaagagggatgtggtctccatatctggagcagacacacacatgaggactcaaaagtgtagactagggaactgaaaacattagcatgtaagtagcactatcacaacagaggcatgtgcaggcaatcagctggggaaaggagcaatgggggaaggaatgtgctgattcaactcaatgtgccacagctggtgctttatgagctccgacctcaggctccctgtgtcttttagagcattgtgaagaagggcagccctggccctgccatgcctacaccagcacttcccaaagtgccatccatggaaacccaggtccccgatatgctctacagataaaagggctctgcaggcaaatttctaggaagccttttaacaccatctaagagattcataacgattagttacatgaaaggtctgaaaagtatttttaagaaaaagtatgtttaaccttatctcagcctctcctaaacattttattcactgaaccttttcttccttttttttttttttttttttgagacagggtctcactctgtcacccaggctggagtgcagtgacatgataatggctcactgcagccttgacttaccaggctcaagcgatcctccaacctcagcctcccaagtagctgggaccacaagcatgtgccaccatgcctggctaaatttttgtattttttgtagagacagtatttcatcatgttacccaggctggtgtcaaacccctgagctcaagcaaccaccaccctcagcctcccgaagtgctagcattacgggtgtgagcccttgcacccagctgctaaaccattttgactgcaacacctactagtgttccttaaagagaatattctccagatatcctgtgagatactgaccctgactcgcttgctcctgactccaggaagtataatttcagaagtcaggaagctttggggccagttcccccactgtatttccagtggaatctctcttttttataccaggccatcaggtcccccttgaaacagagggtctcagctgggctctggggtgctggggagtggtgaagaccctggtagtagctggtgaaaagccctcggcactccccacaagcagcttgggtctcacacacacacccctctggggtgaattttccaccgtgtcttggaagggctatgtggtctcagaagagttactccgttttcctgtgcttttattttctgctctataaagatgacggaaacaatccccgctctttgatgggctaccataaagcctattgcactcgtgcctgtaaatgtctttggactttgcagagaaaggggtgaaataaaatacaaggtgtcacttttttaaaggcttcaatccagccaaaggaaagggcatctggagaacagcaggcaggctcttgccagggagtgtgtgaaaccaggccacaggcgttcacctggccccagcaggctcctccactccctcccagaagaggtgcgggcaggcactgtccctccagagaaggtgacctgctcagcatctgaagcctctctgatggctccccttcttcctacagagtagggacagtcagagcgaaaacggggagagcgtgggcaagcctgagcaggccacgtgtagagcagacatccactccaggcctttgatagcctctggcctctcttgcgtggcctggtccaccagcccaggccaaacacagctctctccccttcccttaaaagaaaaaaaaaaagaaaaattattgaccaggcatggtgactcatgcctgtaatcccgccagaggcaggcagatcatctgaggtcaggagttcgagaccaacactgtctctactaaaaaaacaaacaaaaaattataggagtcaaatttacaagggagtgttcaagatttagtctgatctttaccatttttccctaaataaggagatggggaaggagacaggaggcagagggttaaagggaggagtagaagaaaggaaggacaaatccaggcaaaggggagaagatgccctgtgcctgctggatatgaccatggcaacctgccaggccttccaagggcagcctggggtgctaggggtcctcgtggcccttgaatgttcctgcttctggttcacaaggagttcgcatccccaaatttctcaggcctaaactgtgctgcagggacctctggcgtcgcaaactctgtacatcacccattatgatccattttctgagtagatgtggctgaatgattgttcacactgcacagggtggggacactgaggcagggacaaagggagtccttgtttcacagttccccaccacctctgccacaaacataggcctcattagcctgaggaggcttcaggcctctcagctcccaaaattgcatttctgaggggtcaggattactgaatacgattcttccccttggctgggcacgacagaaggacatcaacagccacgtacaaaaagagagtatacatttggctggttacatcattcactaaccagaaagtcagggacctgtgactctcttcctctgcagaacctcttgaagcaagaagcccaggcaagatctgggacaatgacagatttctccctaagtttccccgtggcttggcttctctctctctgaatggggccccaagtgataaaggtgccattgagtcctttgaccaagcaccgtccaggtcttcatgattgctgaggtccccagctgtggcaggaggtggccctgctctttgtttccttgaatctggggtgatgggggagggatttttaagattgaaacagtggaaaaatcacaggacttgggttcaaatggcagctcagctgcttcccaattgcacaacttgctcctactgttctgtaacctgactttccttggctatagagcgggtaagcttattggagcgatggcacctggtgagctgggaagcacttcaatgtaagatatttcatgttgattttttgtgtatagaaatcctgcctggaacaggggtagaatggctgcagggtgtggccctagcatgcctcttgaccacagcatgcactgcaaacacagtatgcattgctgggtctgagctgaaaccaccagctaattacagtacctgaagcagggggagggagggtcccccagggcctgtagacctgggaggtggacatgtagagaacagatgccagggctgcctgggcccgggaaggtgaggctaattggtgaaagccttcaacaggtgagggttgatgtggcttcctgagcacctgggtgatgggggaagagaatgtttgctccagccctggctgagccttcccctgggccccattaacagtgagattagagccacagccagaggagccaggtctggactctgctattatcaggagcccagccatgccctaggcctggggctggcctcctgtcactccacaaatacacaaaatgtttggccatggttatgataacccttgtttattagagagcaactctactctcacaaggaaaggaaataagcacccattaaatgagaatttatatggagcccatttggacaaccctgtggacagacctagaagccctgagagggccacactctctgggtccctatccagaggactctggatcttttttcactggctcaaatgtcctcatagaatgcatggggtacaaattaagatggctgatccactgtgctccaaggactatgagctcaaggacaggggccacgttttatgcatctttgtacccctagcttagtgcctggcttataataggctaatacaatggatggatagatggatggatggataggtggatggatggatggatgggtggatgggtggatgggtggatgggtggatggatggatggatggatggatggatggatggatggatggatggttcgttggacagatagataaataaaagcctgagcttcacagtggctaacagtactgaaccagaaccaaagtgcttaggtttgaatcccaactctgccacttaatcctgtgtgaccttgagaaagtcacttaacctccctgtgccttaatttgttacctgtagaatggggattattacaatagtacatactttgttgtactgtggtgaggattaaataatttaaaacatatagaacaatgtttggcacttagttctatgggagtgttcactcttgttgtttgttgtcattagatgggtcagatgacctctgcggttctcagcatctttgaggaaattcatggtatctatctcagaggtatcatgaaaattaaaggggctaatgttgtgaagatgaaatagcaaaggtagttcttcccaaatatcttccagaatccgatagacatttggtcacaaagctgactgaaggagcaggggaatggtctcagatccaggagactgagcgctattcattagaaatgcaaattcttgagctccaccccagacatattggattaaaaagtcttgggtgggggctcagacatcttcatcttcacacctctccaggtgattccaaccccctcttgctaaggtttgagaagcactggcctggatcaccatggagggcccttcctagctgagggcactacagaacacagcatgtgcctagcatcccgactcgggagcaggaccctgagctggacctggatgcagagagccctcacagcagcctccccaggggcctgccacgcagtgtggtggtggtggaggtggtgtggggagctggagctgacactccgaattacaatctaatagcttatggcgcttccctcgtgcaccgcagcaaaggttaccgtgcaattacgtgtcgccacatacaaatgacagagcagttacggttactttaccaattacagggaaattgctcccactctgcagagagattggcactctgaaaagctctatcatctccatgaaaaggggattttaaatgcagacggtttccttcctccagcagttccccaggctcaggggcagagctgcaaagccactgccactgcccaaggaccccagaagtgcctggtagtctctgtggagactccctgggaagggctggaggaggaggtagacctggggaacagtggggggatctccccaagaactctagacatcacccccaaccctaggcctcaatgacacactcttaaggaaccaactatcacccactctgacagccacatcaatccatcttgaaggcagcaggtgatgaggcggggtgggcccctgatccccaaatcctcccctgaccccagcctgcacagcccctggtgtgagtcctgattgcacctcctctgccaagcaaagctgttttagccccggccctggcttgccccacctttgcagaaacctcacattgagtccttattacagaaaggtcagaaccaagccagagctcaatggcccaaatgcagtgctaatgaggtgaaggtcagcaggtccatccccctgtgggccaattagcttagctctgggacacagtctcttccatagccacaggctgccctcttactgcaggcatccactgtttacaaacatcctaagctgatcctgaagaggcagaccaggtgaccagcagggatgtgccatgcagccaactcctccagccacctatgtacctgccctgctgctctggggcagcagcagccatctgagccccaggatggaagacaaaatcagatctggtcttcccattgctctgtgggcaactcctgtggtccaggagagagaggatttctcccatctgggagaaaaccagctctcctgcccttcctgaatggaaaagtatcatctagcctcatactcctccacagctgggaagtccccactcctgtccgttgcatagggtaagaagacatcagagattttcccaagctcacccatggtggggccaactggatctttagaccaaccttttcccaccaaacctttggttccttgggctattggaactccctgcgttcagcaagggaaataggcactagatgaagacaaggctatttacttttcctcacttactaatttgcttaagagcatttatgaaaaacctactaagccccaagcactaggtgagcccctaagaatagaaagatgaaaaagtctcagttcctgccccaaagaactgcctctttcccagtgtggggatggacagacctgggccatgactagacaaagccatctgggccctgcttcagttatgtgcctgggggagtccagagaatggaccaccaactgccttggggagcaggcatgactttgaggaagaggcgaggtctgggctcacgtccaagttctctggcttatgaaacagtattctgcccctctttcacacatcatatttcagatgcggaaaataactcaggatcataaaatccaacagccccattttacagaaggggccactggggcctggagagtgaggtgcctcccctagttacctatcaagttgctgagaaaataggtaccaaaaccccaaattcctggtgacagaaaaaacaaaacaaaacaaaacaaaaaagcctgattttttttttagatggagtcctgctctgttaccagggtggaatgcagtggcacaatcttggctcactgcaacctccacccgccaggttcaagcaattctcctgcctcagcctcttgagtagctgggattacaggcacctgccactacacccagctaatttttttatttttagtagagacggggtttcactatgttggccaggctggtcttgaactcctgcccttgtgatccgtccaccttggcctcccaaaatgctgagattataggcatgagctaccacacctggctaaaaaactgatcttaagcacgggtttcctctggggttgttagagggtggtcccaaagacaatctattccaggatcagaggaaggcaggggactgctggggaagagactatgtgtccagtccctttcccagcaccagggatgagtgctctgccatctccagaaactggaagcaaccaactctcccctcccaaggaggcccctgaccactcacttaagctgggcttcttcctttcctgggtctgtgcatcccaaaggaaagtgagaaatgacgttttgaaaagaaattcaagttaggagaaaaagggaagggaagcccatgagctgcctattgatacagaaaagaaaaggtctttatattcttcatgttgagcagccctaaatttcttcccattaattacacttatgcacacttgtgcacgcacgcacacacacacacacacacacatacacatatcctggttgctgaccatagcacacctccactggaaatggggaatcagtgaattacacatgtgggatttctttttaaagggagatattgatcagataaactgtaatagctcatgtctaaatgcaggctccagttgtaaagctctgcagtacagggagataatgatcacccacttattgggaaccgtatctcaaatatgacggctgacccctaaggtgttcataaatacacaaaatgcatccaccccttgagatgacatcgtgtttactccacaatacctcctcaggggtagaggtaagtggagagtgtccacagggaggtagaaatatctctgggagtctctagtaggcttaggtttagctcctcagaaagcctattattctataagatatttccatgtgcttgagtgatgattctgtaacaaagaaatcaaaaagacctgactatccaatcctctgattgctttcctgtaatgcctaaactttctcttttatgactcctagccctccccagaaggtctgccttcagacacgtgacattgagacacaggacccacgctggccctatgagattgaagtctcttgaaagcaagccagagaagtcctataataggtgaaagttgacccctgcaccctggttgtgagcacaggccatggaaacaatgctggagtgagggctcatacactcagttactaatgcttcatctcagaatgattctttcgggtgtctttttcaatgagattgtagggaaaacgaatgtgtaacagaaagagggagagccagcaagccacagtcacaacaacccagttagacaaacacatcattgcaggggcttagagaaaagtgtattggggttggaaaaacaacccaacaaattatagtagttcccctgatccttggcttcactttccatggtttcagttaccgcagcttcagatcaaccactgcccaaaaatagaagagtagagcacaataagggatttttgagagacagaggagacaatgttcacataatttttattatagtatactgtcataactgttctattttatgattattattactgttaatcttttactgtgcctaactgataaattaaagtttattataggtatgtatgtatattagtccatttgctgataaagacatactggagacttggaagaaaaagtttgatggacttacatttccacgtggctggggaggcctcacaatcatggcagaaggcaaggaggaggaagacaggtcttacacggatggcagcaggcaaaaagagagagtgtgtgcagggaaacacccccttataatatcctcagatctcataagacttattcactatcacgaaaacagcacaggaaagtcctgcccccatgattcaattacctcccaccaggtccctcccacaacatgtgggacttcaagatgagatctggatggggacatagccaaaccatgagagtatgcatgggaaaaaacacggtatatatggggtttgggactatctgtggtttcaggcatccactgggggacttggaaagcatctcccaaggataagtggggactatcatatggccccagttctcaagaaccaagagctttgcttctgggcatctcaaaaaggaggagagcagaccagaaaacaggatagaaagtcattgtgttttaggaggtggggctggggattttgatgcaaatattcattaaatgaatgcatttaactacctatggaatgatgaaagccatttgctaaaagcaacacttcttttaatactcattttgaagtttctatgtgtgttttgggaccatctgtggcccaagcccaccagatatctaagtggtctttcactcatcatgaaaacaagctatccttctaatagggaactaatgtcactaaattgagcagttttccctggagaagggcattaagccaagcacacattctgcaggccaggctgtaaccaatagcgagctttagcagtgcaccccttctaggggttgctgagcatagcagccaaagacaagcttcagctcagaatcctaggggttgaacccatgaccttctcctcattagcttagctgccaagagcctcgtgttcctccctctgagaagcagacagggccatgccctgggaatagtctggacaggccagagctctaggccagcctaccaagagaattgaaattctgcagatggcattatccctgggggctggtttagcaaccaacaccagacccatgggaaatcccagggaagtttctcagcattgcgaatggtaacaaccaaaacctactggggtgccacctctctccttttgtactttagctccagagaaccccagtggctacctgtcaggggcagataaatcccatgccaccagtccatcaatcccaaatcccactgtccctcctggagtctatggcaggcagactcagcagccacaagggctgtcattgaagtgagaaataccatgatgattaagtttgtgtgttttctggtgggtgctgggaagcagtggccctgctccccaggctgagttatggggtaggtcattccctcattagtggaaataaattttattagccccactctcacggcaatgtatcttcctctcttgctcctcgggtctaggtgtgggtctgggtaatgttgcctgcgtgtgggataaatcagccgaacaaatcccattatattttggaacactgacggagacacagtaatggcacagagaccagggaagggagtgggctgcttctctcccactgaccccgtttcctgcccatagggccacacacactagggaaaacatgtaaattgagaggccagatggagaagagctctctcagttgtctctttctccttctctccactgactttcttgataaaagaaacaagcctggtgtggtgatgtgcagtccttcccttataccttacaaaaactaagggacatgtgaaggtaacagcagcaagcactggcccaaaatgtgtcttgtcacccaaatgcattatcttatcattcataacctgtgctatatagaaaggaaggcaattggagggaggccgaggtgggtggatcacctgtcaggagtttgaaaccagcttggccagcgtgatgaaaccctgtctgtactaaaaatacaaaaattagctggtcgtggtggcgcatgcctgtaatcccagctactcaggaggctgaggcaggagaatcgcttgaacccgggaagcatgggttgcagtgagccaagatcgcgccattgcactccaccctgggcaacaagagtgaaacactgtctcaaaagaagaaggagaaggagaagaagaaggagggggaggggaaggggaaggggaaataataataataaaggcagctggagcacatcctagggcctgagataccaaacaccacacctgcattaagcacagcccaaatctctcaaaagcaggtattggtgaaggaaaaaaaattctaagcatgaaatcactgcaatattattacgcccctttctgtccccttgggtggttattataactaaaggaggagacacaggatgatgctatgaagatgtttgagtgtcctatgaatataaggggctgtgtgtctatcgttattaacatctgtatatttctctttccttaggagcttccggactctttattaaaaggatacttttttatcatctccttcttgaagataaaatgtgtgattcaaagcaaaagggaaactgcttgcccagtgatatctcacaagctgggactggctgagacccaaagatcctgactcctagaccagtaacccggccaagacgccaccctgtgaggacgaaaggaattgaagggaaggcccagaagtccagatctggattgttaagtagggctggtctatgtgcccattgaacaagaggtctggcttcccattttggcagggttatctcacactgcatgaggcgtgtgtgtgtgagagagagaaatctcattgtacttgctgctgagcagagtgtgtgggggtgagggagaacaagtcacagaaatagggagacagagaaaggctaagagaggaccgtgcaccaagagtgtgagtgagtgagcaagaggagagaaacagagaaagcaacagacagcaacgaggaggacagacatcaaggacagaaagaatgggtgtgtgcacatgggtgtgctatgggtgtgtacgccactgtgctcgggctcatgacatgcagtccatgtctcagtattgtgagagcacacatcctcaaacctgactttgtgctaagctctcctggcagcagtctgcgttaaaattcagcctgtgtgactcctgggtcccgcctcactccctgctgacccgatggcctccagggtgggcatcctgggagagtacatccagcctaggaagccagcctcaactttgctcctgccaaacccaacacatcgcccagggctcagctacctgtcacacaaagcaccatgcacactagtctgggatgggacttttactgcaaaccctgctggccaaaaagagggaggtgggcgggcctttcacctaaatacctgagacaggtgccatctccgagagagtgggaagacttgattctataaagattggggctgtgatatgtcaggcacccagtgctaaataagaaatctggagtacagggtcatgggccatgagaggtgggcactcagaccaatgtgttagatttttgatgtgtgcatttattgggacatgagtgtggcatgggccatggtgtgtatggcaagtgtagtggagatgagagaggaaggatggtgcggggaagaggaggagttccaggtctagagaggacaagagctgagcagaaaaagcaagcctcgtctaatgccataaacaacaggatacaaccccatcaagtctgagccctgtgcttcctgctgacagggaaaagaaaacaccccaagaagacctgcagaagccaggccccagagcctgggatgcctgcctggccattccggatgctcactttcgtggagtttcaggatctcaggcgccagaccaacctgagtaaccacccagactggaatgtgaggccagcccaagtccaagggggtgaccctgtctcctgctcaggactgccatgcctaggaaaccagtgagtcaaaggaacggcacgtggaaggggacctccatcgccacccagtcatgcacacagcagggcaggaaggggagctttgggttaaaaagaaacagctccatctcctgtgcctgtgtggcccttgtgggactacacagggctggtgggtaaactccagagtcaggtgggagctgggtctagcaatggttctcaacgagaggcttctggaaatgtgagaggttttctagtcttgtagtggctgggaacttccactggtgctcagcactgtagggccccggatcacaaacgccctacaatatcaggcagtccctgcaccaagaactgcccaccccagacactgctagcacactcttgtgaaacaccacgggaagagcaccaagctgagaattaggatacagaacagccttcagtttactaattacatgaccttgagtgaaacacttgagttttgtgttcctccattccctcaactgcagaggatgcctgcccttccattatcctacagtattgttgggagaagaaaagttgtgagaaagcccttgttaaccatcaggtaccatgcaaactccagtgtgttatttccagacagccgggaggtctctgccctctgctcccactactggggtttgacaggtgtcagttggtgatgctggataatagtttctgctccaaggacccaaattttctagttgagggacactcaggtcaaggcttgacagggagattgagaagctgatttctgcaccttctgcatgccacctttctccacaccgcctaatcagtactatggccgagactatctgactcccatacccatggctcaatcagttccaaagtcagggaagactgaagtggagtgaatgacagtcactcccatgaccacagccattgttcccatcacccaggccataatgacctgctggtgtgcatctctctcctccactgtgtgggctcctggagacagatgccattccacaatgcttggtatccaccaggagggagtgcattgccaagcccttccctagggctccatatatgtttcaccattcattagtttattaagaggtgctagttcgttagtgttggatgaggttgccccaggaaggtgaagaaaggagagaaggtatagataaccctatgcctggggaattctgggatgccaggtgcttggtcaaacccagcatcttctccagccagctgcccactccaagtcaggagtgtcaggtcccccccagagaaggacagacagccatcaccttctcctgcataaggtcctggcacatgacagaggccacaggtgtgggctccccagccttactgtctgtcacatgctctgcagacagggggcctcagggagcctggatggcagccttcaaaaggggctggggatagagatgcaccagtgataagccacagaaactgagaaatgaaatcactgccattccccacatgagtgctcattagcaaatcagtctcagcttgacctctagtcccctgagtcccaagacaattggggctctgacagaccctctaggaccccccctcatacccatgtcctcatgagatcctcagagttactttcagatactaacccacttgttctgggagacctctttccacccaggctggagaaagccaggacaggggtaaagcatggctcagagggtgaaggcggaagctgctgttcccaccctccactgacaccagaaagccccagctgcttccctagcctccacacttggtgcccactcaggaatgtacatttgtgacaggttcgtttatgtccacagcaacacattcccatgaggaggccactcctggccaaccagccctcatctccaatgggagcacagccggccttccctgattcacctgaagttgaggtacagctgagctctctgggggctgcaggtcagcaggttctaccccaacggcccaagacttttccctctgtgcggtcctcaggctctggcctgcccagtgctctgtggatgctccctggcacaaggggccttgtagtaggggttcttcttcccattccttcctatcccccaaatgaacacagccaaagcaggtgctgggaccttgtgaaggaggcaggtggcccaggagttttgcggatcccggctctgagttctggaggtgtgagttcagggggaagaatgtgggtctcaggatgtggaaagggctagaaaagcctgaagagccccatgggaggagcattctaatttagagagctggtacagcctggagcacagttgacattcattgctactcaaatcccttcttcaagcttttagagttgtaactatgataaaacccacaggggaccccttaccctacaaaatacaagtcctaaaagccaacctcctgggccttgccctgccctctgtcatcttcctacaacagaaacaccacaggacagaggtcatctgggactgagttctcaattcacagggctcaagggagtgtcagactccgtgacaagagagatctccagagttcatcttgttcatcctccacctctaggcaggaagggaacaagaaaaccaacccaacagccttgtaaatgagttgaggaagagctgggtttgcaaatggtgccatcggggcaacacagagcctggcctggccgatgtcgcacgaaacacgtgtggtctgagccgactccaaaggaatcgtaacaggagggtgggagcaaaggaactcgggtatctgccaaatcaaaggaaactgatactgtgcattaaacaccagcctggcctttttcagactggctggagagacagccccaggcctgtgcagagtttctggcctcctcctttctactctcggccctgaacttgcctgtaacttgaaagggctaattaaagccaaaagaaaaatcaaaagcttgttatcttgctccattactccccgtcccggcattagcctgtcttgcaaagctgttttccctctattctctccaaggctaccacacggtgttaggacctgcagctctgcagacttccatgatgaacttggctttttgtattgtggcaggaagcaacggcagcacgaacacttgcccatgggcagccagacggacgcctgcagctgatttttctcccaagagcatcgcccaaaaagtcagggttttaagaaagttttctacaggaaactgtcagagattgccaactcctctggtctcaaaagaacttgttgttgtttagtaagtgcacagtataaacttgccgtcttctaacataggcctgcatatgtgtgcatgctcgtggggaatttattacatgtatgcatgtatgggtgtcctgcaggcaagggggattctcttcaattggtggctctgttactcactcctaagatgtgtgaccttgggcaattcattcagcttgctgagtcttgagatactcaatgcaaaatgaatttttaggccaaggctctctaaaggccttctcaacaccaacattctaatacatctcaccacagacccatgtttgagtgtctaatagacatgtccagaacagcctctgtcattagctgccttcgtttggaagcagtccatacccccgtaagttcacagacctgtctcatggactctcttaagtggctccactactgccccaaacaaagggctccaggggcattcccaaaggttgtcacctgctaggaagactcagtagataaagtggagtcccctccattctccagtctggctctgatttgtcaactttttgctgccctgcttggtccatagcacctctcctatttcctttgtgacatcagggaactcctggattttcaagacctccaagaagagacgacatctcttagtttcagctggcccagtgcctggaagacttgacagtggaaaacagcttaagcctaatgccagggcaccatctttctcctccctcttccctatctccaacccaaatcccaaagaccagagtgatggcctctccacactctggctggggagggtgccagtccccactgagatctgcctggcacatagttatactttatgaaaggaaatttacacttttttaaacaaccaaaatacatttcctaatatggaactccaccaaagtttaaggagtcaagaatcacatcagtatggatgcgtacttctgtccaatggatacattttcctttcttcttctccccaaattaaaattagagaattgatgttctcagactaggttcataatctttaaaatgcacagttataaaaggaaaaggacaagaacactgaagatgctgatagctgagccttccaagtcacccaaagaatgatagtgaaaaagcaggaccattgtgaagaggaacagagtcaagccacaagaagggggatgcttttcatggtggggcacacgtgagctaggctgtgacaggcaggagtctgtgtcccctgcttcacctggggtaacccagcaaggccatacccaccagccatgcgaagacccctaagccaacccttctcctgctctccctctggctccccacagctctcccatcatcccatgctgctctccggctgcttcctgactttctcacatgtctcttccaaggcactgtgcacacagaagatgctcaataaacacaatttgtcccttcccatcccttttctaagttagctttgctttctctatgtgttcactgcactcttacctgactgtgctctcattttagcatttcctaaagacatacaaagggctaaaaacacacctctcctgaaattccatatctatcccaaatgtaggatgactcctcacattctcctctccttctaccatatggtttttattctaagctcccaggaaagttatttgcaggcttggtgagtacaaagggcatgtacgtgtcttgcactacagcacactgtgatctagactccagccatgcccggtccctacgacatccatttgacacaattcctacctatttccagcactccccgtcataactagtgagccaatatgaggcagagaaaagtacactgatgggaatttatgtttcagctcccactctgactcttatacattcaatgtcatagttgcagaatatttggtgacactctgggtccaatgagactcagagatgggatgggatatactcacttcatctgcaaaaggggaaggatgatacacatcccatgggggctacaggctggggttctcatcctacactcccaaccatcccagcgcgcagccctccctgtactcaccgcactgctgcaggggatgtccttcaccttgagccaggccaggtccagcgtgccctcgccccggtaacaagactgcagccgctccttaatgcggtcatttatctgcttcaagatgaagatgcacagggccgactcatccagggatttcattttccgcttctggcccttggagaagacggtgaagagcaggtcatcatctggatggactccaagggtcctgccaagcacggcccccgctttggacaggtaggcagcctgcagcaggcggtactccaccccactgcgctcacagccaatgggcacctctacataggagttgaaggctgtgtcctccttgcaaagcctcacgagcttggatgtatacacctgctccttggtggtggagcctggtggagacaccatctcaggttggagggtcaaaaagtagacaaagttgccactgctaaaaccatagacatagtagatatcaaagtcagggatgatggtgaaggtgtccgaagggatcttaatcatcgaggccacgaactcatcatggaagacgtacgcgaacatgccatccgcctcagagttcttggtcagtttccggctggagatggtgggaaaatactcgggcttcccatccactgccgtggcaatgaacagcttgtcatccaggttgctgtaggagacgatcactccaaagactgagccgctctcgttgacacctgacagatagtgctccttcttatgataaggctcccccagcttgaagaggtcctccagcctcagcagcttgcagatgccttggtacaggctcccacaggcaatcagcctgttctccttgtagtctatgaggagcatcttgttgacattgttggtggtggtcaggggctcattgcaggtctggacgatgcggggtgggtaacacttggggttgtcctcgtccggccctgtctcatgcgtcaccaagaccttcaggtcgctggagagcttgtaaatccgattgacggcccccaagtaaatgtgtcctgtcctctcatccaccaccaggtgattgaaaccctcggcgggctctcctcggaatgtgacaaatgaccgctgcttctgggacagcggggctggctgccgggtgagcaaagtggaggagcccatgcccaccatgaggaggtgggagagaaggcaggtccagttccagggcatggctttcatggcagaggcgggtcccagtggcacagcagcactcaggcacagtcgtcccctcagagggccaggactcagcaatgcagtctcccctactggagaaagggaagacaatgagctggataacaatgccagtggcttcatttcaccccacagcttgtctgcctggactttcaaaatgttctgcacacactgagcagaactgcactggggggtgctggaggctgactgagtcaacccccaccacgggcatgtgacacagtcagagccgggtggcagcagccccaggaggacacatcagtaacgataatggtggtgatgataatgacatgataatagcagtgatgatgatgatgatcatgattaacagccattatctactgagtgcctgaatttgtgtcagacactgtccagcactgtcacccgggtcaggtgccaccagcaggcagcatccgcaaagactggctggaggagaagagggagggagggagggagggagggaggaagggcaggaggcggggctgcctgcactggctgcaagctttgtccggtgttccccacagcaggcctctgcacacagtttctccgtctccaggctctgtgaaccacctcctgctggaccccatctggccgtagaggtggtaacagagacctcactattactatccacccatactacattgccccttaaagagccacacttttatgaatagcccctttattaaccttttctcaaaggaccaaatttgtatgtgctgtctattacctgctgggaccctgattggtagacctccgaagtacatcctattgtagccacattttatagctaaggaaagcaagcttagggaagtcatgtaacttgcatagctataagtggtagaggtagctccaaatatgagtagtgtaaatgtgcacaggttcgcaatcttaactgctaaaccatctcagttcaccccaaccttgcacagttggggctgtaccgtggtccctgtcccatgcagcagaagaattaaggttgatcccttctcggggctgtccattacagccactacctccagttctctgtgtctgtacctactactgcaggagaaactttcctctgtgcctcctctgctggatgaagaggccaaattaaaaacccacatcctcaatctcgtcacactgcagctgcaaccaggtcctctgggttcactgcccaaccctgagccctaatgttattttaacaaggcagatcttggcttcctcccctagcagggcctcctctgagaggttttcattaaagggagagaaaaaatgctttaagaagcagtcaagcaaataaataaacaaataaatacaaaactccccgaggaacaagatcactccccatcctgagggtctctttctattcaaggtgcttcctgcatgtgttcccattggacagctttatgtttcttccagttcgagagaattcagggcaggaattgccaacatcctatctgggggcatctcagctctgtggaatttttctcattcacccccaaacacctcaaaagtagagaatgagaagaggtagatcactaagcaatggaaaattccccagcagggagcaaacgctaggtcagatggaaaccaagagaagaaggaagaaaaccaaataaagactttgcattgtcagccagcatcctaatgaaaagcacaggccttctccagtcaatatcagaggaggaagactggttagtggaacacaccacaaccaagagcagtgctgaaagccaagggccttcattcattcacccatgtggcaaatgtttgctcagaacacacacaaaatgtgcaagacactgtggggcccaaggagcagatcctcaacgaatgcgtagtcaaatcaggccgataccaccagaacctgaactgatacgcacgacaaaaagtcacatggcatacaagagagtgctttgaaagttcctaggaggaggaagacttctaacttagggtgagagagggcaaggagcaggctgcaggaggccttggggagggcatggaatttgggctgagctgtgaacttcaagaagacagtcagagcacgaagggaaagaccttctaggggaggggtctacatagcagaagcatgggcatatcacatgagggtgtgtacaaggaagagtacgtctggagaacatagttcatgaatgaatcaggtggaagatgaggctgaaaagagagagcttcagccttgccaggatgtcactgggaagttgagactgaaatgcacagtgttgaagacagaaatgaaattgtagaggaaaagagcaaaggcccccagagaggagcctctccctttccatttagccttagcctttgcagaaggagagtttggagctgagggtctgtgaactccacagggcagggctgggtctgtcttgctcgtcaacacattcacagctgcacatatagaggaggctcaacaactgtttcttgactggcagaaagaggggctggaagcatagacgaataccaatatctgtggagtatttactgcaccccagagcccatgcaaatactttcacatagcttggctcacataatcctcaccactgttccctgggatcagaattgtcttattcctatttcaggtgaggaaactttagctctgcaaggacactggttaagatgtagcagaactgggtttgaagtccaggtttcaatcaatgcaaaatccatacttttctagaaatgcacatttccagagcccagaagatagagcacttagaagcccttgttaactcatgtaagccccaaacagaaatcctgggatatcacctaccagtatcatgagaaaaacaaagtcctctctgaccttcaggggctaagctggtagataacaccgatcaggtgagttctgtggtttacctctgaaagtattaatgactgtaaagcagcagctgcacagagcctctgcctagcacagttaagtgcttaggaaatgatagttgctgtcgttgttatcgttagcaagattaaaataggattagaaagattaggattatgataatgagatggttcctggtggtacatctcaagatgagtgatgaagagtcaagatggttcaccttgaattgcttgtgcaaattcaaatatcaaagaagaatctataagtttttgatctaaaagagataatccagcttagtgattcccaatccctgattttagagacaaggaagttgaaatccaagaggtcagatgaaattgcaagaggtcacacattgagttgaagacagtgtaagactgggtctcacactgtccatcccatgctctttccaccaccccggcctctcttctgactttatgtgaattcactccagcagctgcttccagcctttgtctgaaagagactgctctttgggcaccatatgctctgccggctaacagggccctcaaaacgtctctgccaacaaccaaattccagcagggctgataatcccccttccagacaggcaggtgcaggtcggggctccgccaccaacttttctgaggagagaacttcgcacagtctctgtatcacaacctgccgtatgctggggaatgtgtgcctaccccacgacctgccttactgtacatacacatggatccatggccaatcagcagctctctagtctgcaagaggtgagatgaagaatcctataattacgaatttactgagcagaaaggtgccatggctcattctgcatcttctattaggcactgaaaggagacacagttatgcatctcaaacacttatcaccctcatctggggatggtgagattactacacccagagaggaggggggcccacagaaacaataacatgtactgggaataaccagcctttcattttacacactaagaaagggactgattaggaaacaaataagagagaaatggaagagaaaaggggaaaataaggatgtgagctccagcttgcctcaccaaagaccccaccaggaaccaccacagaggtgacaccccgccgagcttgggacccacagatatgcagagccaccagccccctgtctccctgagctgtctaaggctgctccaatctggcaaagcaagagtttccaggggggtttcccttccaggatgtcaattcttgtaagcggtaaccccaacctaggaaacccccaccccaatatcagagcctacccaccatttcgctctcaagtcaccatttagctagtttcaaaaccaagtattagaaattacattcagcccaactctgattcttaaaggcaagtaatgggaccaaataaccttcacgattgccccaaaggattcatcgaactacgtagagtgggtaagaaggcaggagaactgaaagaccccgtaacccaactcaaacatgctacagttttcccttctttgaaatcagattttaattttgagtagtctcaggggagatgggactcatttatagaagctgatcatcattttgattaaagaaattggggttgtctttgttttaggcagcaagtttcaaagaactgaaactaattttcatgaaatagcaccatcctctcagattcctgagtggtagagaggaaagttattatagagtcgtttaaaatagcaattaccctgtgaaattactttagagtttacaaagtgttttcatggatattaccttgttctgaatttcttgttcatgacaaccctgttaggtagatgaggtatttataagtatgccttctttaaagataaggaaaccaaggcatgaacaggtacagctcttggctaaggtcacacatagtcacgttgggcattggagagctgagctcttcaggcctcactcagttattcacaatatattccctggccccttggacagagtcctggtcctcagaccttttattatggggtaataggattctcagaaaatgtgccctaagatggcatttcaaaattcacgtcacaacacaccatgaattaggtgagtcacaggtgttttttgttttagtttttgttttgttttgttttgttttgtttttgagatggagtcaccatctgtcacccaggctagagtgcagtggcacaatctaggctcactgcaacttccacctcccaggggttcaagtgattctcctgcctcagcctcccaagtagctaggattacaggtgcccaccaccatgcctggctaatttttgtacttttagtagagatggggtttcaccatgttgggtcaggctagtcttgaagtcctgacttcaagtgatctgcctgcctcagcctcccaaagtgctgggattatgggcatgagccactgtacctggccaggtactcttcttaatgaaataaaatagaagggaaaatactagtatgtcacatagaaaagataagcactgtttggtgagactttttttttttttgagacagagtctcactctgttgcccaggctagagtgcagtggtgtgatctcagctcactgcaagctctgcctcctgggttcatgccattctcctacctcagcctccccagtagctaggactacaggcgcccgccaccatgcttggctaattttttgtatttttagtagagacggggtttcaccatgttagccaggatggtctcgatctcctgacctcatgatccgcccgcctcggcctcccaaagtgctgggattacaggcatgagccactgtgcctggccggtgagacttttgttttacccactatatagcaaactacatattgaatgtgatgtaaatatgtgtgatgtaactgggtccctgggatggttaattttatttgtcaacttggctgggccacggtgcccagatagttggtcaaacattattctggaagtttctgggagggtgtcttgggataagattaacatttaaatcagtctgctttgagtaaagcagactgccctctataatgtgggtgggcctcatgtaatcagttgaaggtcatgaatagaacaaaagactggcctcctctgagcaagagggaactccaccagcagatggcctttggacttgggtacaatattggctcttctctaagtctcccatctacaagcctaccctacaggttttgaacttggtgcctccaaaattgtgtgagccaattccttaaatcaatctctgtgtctctatgcacacacacacacacacacacacacatcctcttggttctgttttctttgaagaagcccaactaatatagtcatggtcaaaaaaatttgaaacacactttcagagacggtgcatacctgttgtttttgctgtcattcatttatcctctgggcatctgtgcctttgcccaaacacttctgctggaattgactccacctctggttcaaagcctgagccactcagcacagaacgggggtcgggagggcatagtgattggatcaggaatgagaaactggttaaatcaggtctccgacaagcaacaggctttggatagggatactaggggagaaagttctagctcttccaccagatgtaaccttggagaggcaagggcctaagaaccgctagtgccatcttgtaatcacaggggtgagagcaggggacaggagcctggaagaatgaagccaaagtactgagaagagcagaactaagccaaaggatagagagtactgggtcccaggcctggcgacatcctataaatgtctcaattgtgtccactgaagccagctctatgcctgtactttccggttacgcaagtcaaaaaaaatttttccccttttgcagaagccagtttgggttcggttttctggcacttgctgatgtaaggatcctaacctatacacagaaaaatcccaaagagtacagtgtctcccaccacaacctctctaatacactatttttccatgggatcaagtgagcaagccaaacagatctgtgccttccactgcccacagagataaactatggttttacagatagcgaggcacaatcccaggtgatgttcgaacgtgtgtgcacgtgtatgtaccaactttcagaatcaaacacaacacttccctatctgctgagcatttgccttaggagctgcaccagcagagctcttgggaagtcttcaccaattcatgcttccgggccctgagttagactcattgttcaaatgaaaccttctctgatcaagccactggtctaagatgcccctactatatattagtgcaggaaccagtgccaccagagtctcacattttacaaactctgttatatttgtccattgatgctgtctcctagcataaaaatatgagctccttgaggacaaggattatatattgcccctcttttctccagttccaagctcagagcctgaaacacagtaggtgtataatagatgtttggaaacacgtgaatgaatgaatgaatgaatgctccatagcagagtatatgagatggcagtgggtatcatgtacagctgaagtacaaagtaaatcttggtgcttcaagtaaatctttgagccagtcaattcaaacagggaccaacctaaaaaactggttgtaccctgttctaaaccagggtttataaatacttaaaatactccattttgtccttttatttatttatttatttatttatttatttatttatttatttgtatttaaaggtaaagctcttttttaatttttattaggacatgagttcaaatgcatcagagaaactacgtctttcgtatatgatttacatggagaccaaccggtccaccagctggaatatcataaaaagctgtcttgtgttagcaaattggactttgagaaccaccatcctatgcagcaaaggaaatcagtatggacctggttgaacagaagaagctgagcctgaaaataaaattgcagcatggaaaacagacaacaacagaaaacagccacaatgcaggagatgccagttgctagaagtcagcatgcactcctgtattcagccaacgactattgatggagcacataccacatgatgagttctgggctgggtgcaaaggatagatacattccagagcaaaaaacagtgtccctgccaggagtggtgactcatgcctgtaatcctagcactttggaaggccgaggcaggtggatcacttgaggtcaggagtttgagaccagcctagccaatatagtgaaaccctgtctctactaaaaaacaattagctgggcatggtggcacatgcctgtagtcccagctactcgggaggctgaggcaggagaatcacttgagctcaggaggcagaggttgcagcggtgagccgagattgtgccactgcactccaacctgggtgacagagcaagactctacctcaaacaaacaaacaaacaaaaccagtgtccctgctctccaggggctgagggtcttctagaggcccctctagctgtcccactggcaagctctgcagatcctccccttcccagcctctattagaaacccagaacttcctacaacactgtacaacaggtcatttaatctcaattgtgcaggtggattgggaagaggaagctaacttttcacaaataacatgcgcttccctatgcgtgaggctgctggtatgaagtcagtgagaggtggccatcagcgatggatgacatttcccagcctctccatttccacatggtatccaggtgtgactgtgtgaatagcaaggtcatggtgacatttccatgccaaagcagggaagaaataagtgtgttttctctacggtttctttcaccacccagctggataaagaggaccctgaggccctataggatggtggagcctcaagatgaaagattcgtgcacccaccaggaacatcagacaagaaagaaacctttactgtgataatactgaaactgtggatttgtgtgtgacaacagttaacctcaccctaactcacaggcagaaacacagcaagctcactgcatctcagagctgggattcaaacgtaatgctggggggctccaggcctctgttctttgtggtgcatcaggctctggccctaggaagagttctctttagatgtcagcagccccctcccttgtttccaaagccagattgcaagtgggtaagcccagagatagaggagatggccaagctaacatatacaggatagagaaatcttcctgctcaatggccatttccaagtttggggctcagggaggtaagtgtgtgtgcagctgagggcagtgagggagttggggagcagcaacaggcctcatttccatttcatctaagaaacttcaaacacttattgatccatgcaaacaaaatggacacatgctatttgtagatttctactccaatttgtaatccgtgcattcaacatagcgtcttcagtaaggtcagtattttttcatgtctgtattttttttactttaaactcttggtttctagaagtgggagccatgaattattttacaactttccctggagaattctatttacacccatctagggcccaatcatgcagctcgctacagtctggggcccatgacagacaactgaccccatgtacttggccacctcactgcagctccattcgtcccggccttcactgtccccttgccccttgttgctagctatctcagaaatgagtgtcacattcatcaaaggaaagagccagagggtagggttgacacagcaaaacccatcactaccactagggggaaaagtcaagtcaaagcaactgtcttcccaagagaaggtcactgctggctttgggcagtctcagtgtgggtggggcctggtggggtcagctcagccacaacacagccttagtccagaaagcagcagtccagcaggggccatgggagccctccttccggtgtgcttccctctgcctctgcttctcttctgagagatgggaactgtgaaattgatgactggtgggagggctggagaaaagtataaaagatggggaagagggagcgatggagggccaggcactgatgtagagtcttggcgccaccaggcaaccagcccggtcccagggaaatccagcaccaagctcagctacgcggggctcccttcatccttacttcctagtttattaaaaggggatgaggagaagtgattaccatggacagagcctttggacccagcctggaagaagcctctgcaggaggctgagcctgtgagcctctccattcagagatcatgtcccagccggacctctgagatgtttatacatggtttccacgccctccttcctttccctcccccaggcctccttgtccttggcctggagggtgttccctcagggtacaaaaccacgtctccctggccaagtctgccgttcccagtagagtcgagcaggagctccagccgaggcccaggcagccccatgtgaaactctccattaccacgtggagatcgccttgagattccaggcactgtgccttgggacagtcactaggcaatggctttctttactccaagtgtggcagcaaggctttaaaaacacagcactctcaataggatcctggcttggggaggatagaatcctaaacttctttccagcatctcacttaaagaaacaggccagccaggaatttggagtcagatgccccagctggagttggtgtcaagacctgctctgcaaaatggcacaggctggcacctatgtggccactgtctcctacccagtccatgaggaacactctatccagggtctgtccaggggtactggctcctggtcttcaaaggggacccaatggcctctgagtgcacagaaatggggggacaccatgggaagttgctaagctgtagcaaagggagacttgctgtcacgtctgctgccccaagacctgagtggaccttgggaaccacagaaaaggggcttgggggtcaccacaggctggggatagtcacctctccagtaatccctgtctcgtgcatgtggcctgaggcttgtccagctgacattttcaccaggagaggaggctcactgcatccctgcctgccactctaacctacactccctgtagcctctctagctgctctggcctggccccagtaggcaaagccacattcagtggtcttcacccaaatgagctccttgctctcctttcatggtaaagggaagaagtgggatgtttttggctcacagccagtcatgcatcagccagtgtcacccataaaagcctcctctcagaattgccatggccaaggatactattggcatcaggtcattctaaccagacacgtcctgctaagtgacagcctttctttcttgttgcctcagtttccccatctgtaaaatggcgtttctggaaataggatggggaagagagatcacccagtttcttcttgtgctaaatccagaagtgagagtgaaatgttgtaggcttcacagaacacaggctatcattgaggttgggaagtttccacaaacagcctttgtggaggtgcagggcagagccacgtgatgtgatgattacaacacccaggggtggtgttcactgggtgacaaaaagctggtgctgaagtttctctccaaagactctttgcatctttgcttaagttgcctttttagctgcctgaatctagattgtggagagcctcaggaatgcctgccagggttgaattccacagtctgccctcagagaactcaggatactcatctgttaagtggatgtaagtcacactctttggagtctattttctcccttagataaaaaggaccaagcacattcttaacagctcaggtgttggtccatttcactgagcctgacaagcaagttgatctttctgggaaaggcctttgcttcttccggcctctgaggacctgggtccgcagcaggaggccagcaggaggcctccaagcattgaaactgccccacccacccaagggcttaatttagacccctcgacaggttgactctgccagcatgatctgacccatttcatttcctacatgtagcaagtaagaaaaagaaatggaaatattcccttctgcagactggtgtgaaatctctagctagacttttctaactgtaaaaacagtcagtgggcctagaaatgataatacatgcaaggttttggaaaaaccaagccgagagtccatacactcagatccttggacctcagcatctgtccggccgcccctccactcctaaaagcctgaccacccccaccagcccctgtcacagctgccccaacagctcagccacccaccttctggccccacagagtcttcactcgaggaagcccataatcccaccaaacattggcactgtgggggagcaggctatttggggctcactcagccaaatggcagggcttctgttgtcaccaacatctagtgggagtgcctcactccaggccccttttgtccctctaccccctctcttctttctcaattccccgaaaaatcaggaagtgaacagttgtctcccttgctggtctatattcatgtaattagtgctatttaattccacgatgagccaaagctcataaaatacaaaacatatttcagctgtgtgctgaaaatcttggcagaaatctccactgcagccggaagctgaacggagatatatttgctccttgaaaaaaaaaaaaaaaaaaaaaaaattcagaatgacggcaacaaagttttggggccaggcactactacctgagaatatgtaagggggtagcagaatagaggattttaggacataaagtttggaaataatctctatcaccatgacaacactaaatttaagaaatatttagtatagatcaagtaacaagtgtaatatatagtgtacatgccagaagaacatgtcatacatcataaggaggttgttttggtcccactcattccttactcccaagaattaacacgtgctttaaggatttgggtcccagtctccgagtcatcctgcctttcccattgggcacacacctgcaagtcaaatggccaagaagatgtgcagtttctggcaatgattccaaattaactaacacatcctcatctcccagctctttttcccctgacccctggactgtgatgaaacctcaccctatctctgtgtttgtgccagcaacacctgggcaaggaacaggaagtctcatccccttcctccccaacttcacaaaaccgggcacagaagggtgaagcaccggggactccatcctctcaggtgcccatgactgtaaagtagatgtgtcctcaacaagccgacctctacctctgaaatcaacaccaggtcctaacttgccagggctgctgacataacagattccctcccctggcacccctatgacttggtcatgccctcttcctttttcaggtgacaggaatacagaaaggagcatgttggtagagggcccagggcagggcctggcagaggggagattcatgttggatgctactgacatccccctttcaggacctgctcagaagctgtgtccatggggaaagagaggccatgaggtggactggggtgtgataaagggtcagatccactgcaagacccaggaggcctttcagtagactcagcagctcttctgaatccactctgtggatcagttccacggacacagacacagcatgctccatgcagaggggacaacacctgccagctcccactgccctcctactcttatgccacccaaaactccatcataaacacaaccatcaccacctctcattggtggaatgctttgccttctctaagctccttcataggcaataagccactcatggctccaaacatatatgaccaccccaacccaacccattaggattattgctgaggcatgactttggatgtcagagaatctcattaactttcccaaagtcatgcctttcctctctctatgcctcagatcttcagttgatccaatactttcctaataaactccaaagctggctgggtgtgttgactcacgcctgtaatcccagcactttaggatgccaaggcaggcagactgctgcttgagcccaggagttcgagattagcctgggcaatttggtgaagccccatttctacaaaaaatacaaaaattagccaggcatggtggcacatacctgcatttccagctactcaggaggctaaggcaggaagatcacttgtgcctaggaggcagaggttgcagcaagctgagattgtgccactgcactccagcctgggtggcagaggaagactctggctcaaaataaataaataaacaaaccccaaagccactcaccagagtcatcactggggattgtatagcaaaagtgggaagggaaatttgtctagaaggcccatgataaatgcacagatgttaactgggaagagagaaaagccttctgacttgttctggcctgtcaccttgataggccttgaaaacttgtgcacaatggagctcaaggaggtggcaccattgggcaagctctcgggggccaagggcttgtcagaagaaactaaccagcaggcagggaagatggcccatgtcttcatgcattcgttcaccaacacttattcagctccctagactctacaccgggaacctacattctgggggtgcagcaatgagtaagacaacaaggtttttggtctcacagagtttacatttaatagggaggatacacaataaacaagaaaaataactattttcagatagtgttaagacctaaaagaaaaaagaagcaaagtcatttgctacaagataactgttgcaagcgtgacctcagagagaccaaccctggcttctctagttggaatagccatggtttgtatctctgaggtgacacttgcagggggactgaatggccagggggagccagccatgcaaagatttgggagaggagctttctaggccaaaggaaatgtaaatgcaaagacactgaagcagacttggcaaggaaaaggcagaaggccgacgggctggaaggcccagaagagcacggaaggatgggtgatggggtgggagagaagagagacagcagatgccggagggtatattccaaatggcaggaaaagccatgaaaaacttctaagcaagggaatgacatggtcagggtctatggctagcaagctcagtctggctgctgtgtagagaatggtttttgggtggaagaggagttcactgaggagtgacagcagcctgactcaggtgacagtgtcagaaagcgagactggttgctccagcaggggttgctggtgatgtggaaacaaggggggcggaagagagggacttagtcacacctccttgatttttggattgaggatctgggtgggtgctggtaccatttaactgatatggggaaatcagggcagtggagcagagaaggcaagagttctttttaggatgtcaaaggtgaggttgtctagagggcccacctggcccaggttgatgctcaagagaacaatcaagggaggtgactcacagagaaccacactgtgtgttctgcggaaggcatctcatgtaaatgctcctaggaggatgctaatgtcatccttattctctggaagacaagctgattctcaataactacaacgaagtgaggctaagatatcaacctaaccctgcaaaaagccccatagagatgggggccttgtaactgtgacggcccctgggtagatgcagagattgtaccaagggtccttggctggaagaacgggatgtcaatgaaagaattttacttaggaacctagaatttgatgcttatttttttgtgaaggaagaactaccacagcaaaacttgattttaccaaagggaaattactgatgcttatgcagtacaggctactttataaacttcacaaattcccaaccaaagttaataacattaaaggattgaaaatggaaaaggggaaacagcattgatcatatacttcttagcaaggagccctctcttctctcaagtcataaagagtgccctgggttccccattatataaaacagtgaagggctaaaggccagcctgaaggaaattaggctgaaatcaaaataactcacactaagagcaagacttttttttgttgttgttgagatggagtctcactctgtcacccaggctggagtgcagtggcatgatctcggctcactacaacctctgcctcccgggttcatgccattctcctgcctcagcctcctgagtagctcggtgcccatcaccacgcccagctaattttttatatttttagtagagacggggtttcactgtgttagccaggatggtatcgatctcctgacctcgtgatccacccgcctcggcctcccaaagtcctgggattacaggcatgagccattgtgcctggcaagacttttttcaaaaaaaacatattaacatgtttaaaactcgtgataaaatatacattacataaaagttacaatcttcacaacttttaagcgtacagttcagtgacattaagtatacccatgtcatggtgcaaccatcactgccatccagagccatttcatctgcccaaactgaaaccctgtacccatcaaataccaactctccatcccctcaccccctgcccctgacaacctccattctacattctatgtctatgaatttaactatcctaggtatctcatatgagtgggatcatttagtatttttcctttgtgtctagctgctttcacctagcttaatgtcctcaaggttcattcatgtggtaacatgtagacaacatggtgtctttttgttttgtttttgagagactcggtctcgctgtcaccgaggctggcatgcagtggcataatcacggctcactgcagcctctaacacttggactcaaacaatcctcccacctcagccttctgggtagctgggacagcatgcacaggctgctacaccaggctaatttttaaaatttttgtagagttgattctcagtatattgcccaggctggtctcaaattcctggactccaacaatcctcccacctcagtctcacaaaatgctgggattacaggcatgaaagatggtttttaataaagatccattttgtggggggcaccagaaacttctgggttttaagtaactctggtttacagttgccagttcatggacacaggtgagaaagggaagacctagagaaaacttgtgaacaaatgcctgtcaagcctttttgggtgaaaacatgtccctttcaccaacctgcatctccagacccacaggattataataatatagcactgagaagaacaccagtccctcccaaggctctgccctgaaagggtcccctattaagcaagtatgagcaacactgcatcaccctcctggggagccatgatgcatgtcagctcactaaaagtcctcagaggtggtgctttgataagcaaacccatggaaggtttgtgaaacagggtttctcaaacttgtttgaccaaggaagtttttcttgcttaaaccctattatgacctctgggaacactgttccatggtacacaccttgggaaatgctggcatgttggtttccattcctcaaggcactttcacatctattttctcactgagtctttataaaaaccctgtcaagtaaattgagaaacttagagcaatttgcttcacttattgaaaagaaaacccaagctctcaagatttagtactggaaggaaaatctctaggtgaggagaagcaacgggtgcgagtggtatagactgcactccttgatattcccttcccaccaaaggctcatgcatggaacacattgcatcctccatcaccatggccccatggagacatagcagccctcccgttaatctcctggcagatgcctgcacgcctgtgacaactgccttctcctgatcctcttagcacagatgagagaggtcacaattttctcagattataagaaatctgacaggaaaacaaatgtagagaaaggaggaaggataaaatgagtctatcggaacaaagtgtaggtttcagtttcatcccctcctagctcattcccagactcaaaggccccgccaacccacacacccaaattgctgatttgacttctaaggtgccctgcctgaatggttcacttccttgctgcctgtagtgcatgtactcctggcgcccctgttggggctgctgttttatttggggataatgactcttctgtcctgccctatggggtaaggctatgcttgtgagggttggacatggcttctcaagaaggaggtgaacatttatggtggcagtcatccaggtggctctcaaataggtcactaggactgatggcacaccttcacaggtaggacagggccctcccatccctctttggtgcatagtcttcatgcctaaactttaaggggtcttgagggtctggctagtggtcaaagacagaccctgccccacggtggcacaatgggtgttaaacagggccactctacaagagacactgatgaagcaaaataaaccataacttggaaaccccattgacttgttatagtaactgtctctatttatttcacttttatcacccccaggccccgggttaaatcctgttaaatgtccagccttatgttagccatgctcttagaagttaatggacagttgtaaatccaaacttaggatgtagattattgggaagatgcattccgttctctggacccaatgtggccaaagctgcagttactggcagaagaaactgaaatctttagacaagagctgaggctgcaggacctcagcacctcctcaagtagacgttcttcctccattgccaagtctagagtctgagttttattttgctcagcaaggtaagagttaccttactgagaaaatcttgccatccacctctcaggagctactctcccagatacccaactgccttcaaaacttgtaggcattttaggcaggaattaccatccccattgagcagatgaggaaagtgaagtttaaagaggctaaatgcctttctccacgtcgtagagattttcccaggaaactacagtgagtaagggcagcacaatgtgtcacagtgtgaaacagactcaaaaaaaaaaaaaaaaaaaaaaagaattggaaagaaatgaagcaacctctagtgaacggactaacaagattcagtccaaagtgaaaaatcaatgacgcaaaggctcagcctgcaaaaatcgatgaggcaacggaccaataacctgtattcccagctgaattgacacccgactgcattacagtcatatttgtatttgcccagacctattccccatgccacctgccagcatactgcccacatgccagactcaacctccacgcacgtgcccacctgatccaatctgaagagcatcttccaacagccctgagaggtaactgatagagcctgcacacagaggcacgagaacagagcccctggaacaaggagataaggtgaccttctgagagttaatttagtaacaatcaagacatctgcatggaagcaccagatatctgcagaaaccaccttacaagggcaaggtgtccccaggtctccactgaaaaagcagggaagtgaagcccaatcagggtgacaaggtttcttccccaggacaagaatataacttaagaaggctataatctaaacagcttgaataaagaaggtattaaccaactcgggatggtcggctcggagaacagagtaagcagcatgagtgcttggtttttaatctcatgccagccagggagggagagttgtggttgactcaccaggaaggtgaactcccaggaggcgcagcagttggacacgaggcttctccatggtgcggactacattgttctcaagaacacccagcctcctagtcccgatccatgctcccccaaggagcagccaacccaccaatgtgtctttcttactggaatattcccaactgtattcaggagttcaccctccacacatggccgcaccccagaagcaggcagccatgattggaataagccaatgattcccagcatcaaccaacagctgtgattggattaagccagtcatgctggtctccttctccctgccagtgatgagtttaggaacagccatgccacccaagcctgatgaatgggactgaatgagaagcctgccaggggcttcaggaatataatttttttgctctttaaaagagactcatgtgagggagcacctctcttccttacttgtccacctgtttacaatgcctggaactgtggcagacttcttgtgcccatgagagaggcaccactgatgtgcctgcaatggctgaacagagagaagggaagtgccaggagtaggatgatgcaggggagctgctgaatgaccagttttagagccgcccaacttgggtcttcttgtgtgaggccaccattcacttatggttcacactattactgggtcctaccagaaggcgaaagcatctcactgactcacccagtaatccctcaggctacagctgtgctcgctgatgatactttgctgccatgaagactatgaagggtgtctaggacagcaacagccattctttcattagctggataagagcagactccagcaatgaataagatggcattttatcttaaatatcaatatccttgggactagaatgagttagtcctgagaatctgttcatctctgggtacacacaccagcaaagccagccccagtccataataaccccaccctggaaggccctacctggcagccactggctgcctcccattgcaggttggtgtcaccttgtttaacagcaatcaaagggaataacagaaatagcagaaaacacctgctaccttctcatccccactctacctcatatctcctcaaatcctccctactctgcatacttattttcatgtctttagatgagctatatctttcttacccacctcgtggcattttggaaagaataaaattaaatcaatatcaaaaatacaaggtgttacagaaatcatggaatttgggacatgaaggctgtgttgaaaatcttttcaacttactatgcattggattcactgggaaagtttttttaaaaacacagatttcagcaccccacccccagtaactctggtctaaagggtctagggcagacatcaatattttttaaaagcttcccaaataggtattcttttttttttttttttgagacggagtcttgctccgtcgcccaggctggagtgcagtggtgcgatctcggctcactgcaagctccacctcctgggtccatgtcattctcctgcctcagcctcccaagtagctgggactacaggtgcctgccaccatgcccggctaattttttgtatttttagtagagacggggtttcaccatgttagccaggatggtctcgatctccagacctcgtgatccgcctgcctcggcctcccaaagtgctgggattacaggcgtgagccaccgcgcctggcccccctaatggatattcttatatgcagccagagtggatgagaaccactgataggcaaaccctgtcacgtgcagatgaggaagcagtcccagggttcaaaatcacgcatctgctggaaagaaagccagggcccttggggtctgatctcttgagccccagactgggtatcttttcatcatgcttctgtgtcaactccagggtatttagatcattattattaatagacagagagaggaagcacaggaggaagactcaccaagggccatgaggaaacttctagggatgatggatatgctcattaccttgattatagtgatggcttcacaggtcaaaacttattcaactgtctaaacatgcagtttatggaatatcaattatatctcaacaaaactgtatttaaaaatagacccaaaaggtaacaaacataaagagacaacatatttgcaaatcaactatctgataagagtctaatatccagaatatataaagaatttctacaactcaacaacaaacagataaaccagtttgaaaatgagcaaatgacttaaagagatgtttctccaaagaagatatataaatggtcaatctgcatttcattagccattagggaaatgcaaatcaaaactacaacaaaatacaatttcacatccactagaatggctataatcaagaaaacagaaagtaacaagtattggtgaagatgtggaaaaatgggaactcttggatactgctggtgaaagtgtaaaatggtttattcagctactgtggaaaactatttgatggttcctcaaaaagctaaacatagaattaccacatgatccagcaattccactcctaagtatattccaaaacagaaattcagacagatatttgtacaacaatgttcattgcagacaacgttcaagagttaaaagatagaaacaacccaagtgtccatcaacagatgaaccaagaaacaaaatgtgatatatccttacaatggaatattattcggccatataaagaatgaagttttgatatgtctaaatgaatgaaccttaaaaatattatgctaagtgaaataagccagacataaaaggacaaatattgtaagaatctacttatctgaatctcaagaataggcaaattcctacacagaaagtagaacagcggttacccagagctgggaggagaagagaatggggagttattaatggcaacagagtttcagttggggaagatgacaaagttctgcagatggatgacaactttagttacacaacatcatgagtgtaattaatgccactgaattttacgcttaaaatggttaaaatggaaaattttatgttttatgtactctaccaccacaagaatttttaaatacagacacactgtagtcctctgccatccaactctcacaattactgtctgtatttgtaaaacatgttacagattaattaataacaaggaaaaggcttatgaaactataatgcactaagaactctacatgaattacctattctatttctcttaatagtctataaggtagatattattatgatctttattttatagacaagaaaactgagtcacagagagcaggaaatctgtcccagaccacaaagttagtatgtaatagaatagtgtttttcatctggtaacttcctagaaatgcaaattctcagacttcactccagacctaaggaagctgtgtttagacaagactgccaggtgattctgaggcatggtcaagttttagaaccgctgtaatagagccaaaatcgagttcagttaagaacctgaactttcgagtgctgtgacaagcagcagtcattcttaacaaagagcagtggttctctcacttaacgatgcatcagaatcacctgagtgcattcttgcctggagtgattctcacctggagcccatcttgagtaggctgatttggtgggtcttgggaagggcttggtaatttgcattcttaacaagtttccaggtaacactcatagcccagggaggacactttgagaatcactaatatacagaatctcattattatccacattttacagatgcggtaactcaaaatccgacattgtaaatcctagaaccacaaaaggggttagttattggctgggcctagagcctcagtccaaagtttttttcactacagcataaagccatcaccccagtgttccagatgcttccaggtgtcaacttggcacaacctcccttaaagccaacacaggttgaagacataaaagacgtttttacccattccaacaaactggcattagagtgatctaaaaaactaactggcacttgtgccaaagaaacgcagtaagaagacagaaaaaggaagggacaataataactagagcctagtttgggggtcaggactctgtcacagtggaatctaaaacctgaccatgcttcagaatcacttggtggccttttataaacacaggttccacaggtctggagtgggacatgagagtttgcatttctagaaagtttccaggtacaaatgcgttgatgcagttgggaagaactagaatatgggtcacttcctctttattcttatgaaatcagttgcctcttatgtaagtgaaagaaaattttctttcctgccttgtttgaaaaaatatgacatcataccatcctttatgcacaatgcattatccttcatatgttttattaccatcacctgtaatgttctatacatctccagattctcctctttccaaaccatttgtcgtctctgatcatgctactctgctactcgagaatcttcgatggctccctattgcctacacagtgagggacagacttagcattgtattcaaagacctccatcatctgacttcatggtttccactctaatagaactactctctattgcccatgcatgtcctgtgctttcctgttgtcatgccttcacccagttgttccctttacctaagattcctttttcctccttccttccccatctctacacttacaaatgtgacctgagactaactatttattccctctaggcctcagttttcttaagcataaaacagagatgacagtaggatcttccttgtaggttgtgatgaggaataagtagagcaatcagtggaactggttgccaccaccacaaatccctcctaacttccaaaccgaagggatttctgtccttcctttaatttccagaataatagaacctgtatacacattatcattatcatgttctactttgcacttgccataatgtttatacctgtattccctttgcagctaaggaaaccccattaaggtgaagatatgcttcttattttcagttgcatgcacagtactcagcacagtataaacacccactcaaagtaggaggaacaaatgatcaggactgttttaccttaaattgcttcctagagctgcccttgcagtgctctgaggtcccatcataggtagccaaatccttgggtggaacataaactcaggaactggagaggtgcaaggcccccaacatgaaaagaattaacttgtctccagacatcacctgttcaaagggttccctggaatccacagaggccagccttagcccaattttccaacccaagcaccttctaataattcaaggattcccatccacatcaggactcccctgtgcttacttaaaacaaaaaaccttggctccacaagaaaaccatttttctctatttgatgctctgggcctctgttctccttttgctctgctagtctaagaaactgcagctgccctgcccacctcggggagctctgatcagtggaagccgggcttcttgagcacacagcctgcaggaccagagagctctgctctcccttctgtgcctgctgccagcacccagcccttcctcccttcaccgcccatcttggagccatcacctatcccacactaacccacctccttgaacaaggccacctcatcctctcatcttagaaccaagaactctggtttgggaccacttcccacagaaccagacccctgtggggttgctctaaaggacagaataaggatattactattattattattattattattactattattatgttaacaagtcaccaggcaacaaaggcaatgagattcaaagacattccttggtggctgagtgaaggctgaagaaagggaaataaaatggttgctttatgagaactcccaaggccagcaaagaggaagaaaagaaaaaaggccagtgaagaagaagccgcagcttgagtgtgtgtagtagtaaagaggagaggggaacaggaattcacactgaaacagaaagccggtcagcttcaacaaggagaggatacaagactacttggctggaacagggatacctggtgagaaatccaatcagcaattccagatcttccctgactctgctccaagtctccccaagtcaccagccccagggccaccgcccctactaactacttccaccattagaccccctcccctctgtgagagggcccatgaaacagcagcaacttccaagtgagaggagccaagtgagagacctgaggttccttccaccccagccctccctaccctggcgtccacatatctaagcctgatgcagagaccgagaatctggctccaggggccctgtccacgggtgcctgcccgtgagtgttgtgtgtgcatagattctgtagtggcggaatggggtgaggaggcacaaagagcctctagcctgagagcagccgggagctggagcaaataggatggacactgggttggctggcactcaaagccttttattttagtagtctccaaaagaagggctatggaaagaaaatactagaacttctatttaaatctatttgtacctcaaaagactgaaacataacagctctactaatatttgatatgaagaatgggcgccattactgggcgtgttgaggggcatggatcttacaggtgcctgagagcagatggcaccatgatgctgaggctgacacggcgcccccattccttaacctgccacagtatttagcaagatatgacagtatacctgagccaattcaggaaacttacgatttactgtgttatttcacttcaataatccagtgttttaaaaactaggcaagtggctttaaggccttcctatcaggagaatatggatagaaaataacacataaataatgcaggcactggtaatcaataagaaaatgaagatgtgatccttccacacctagtatagatcttcatcatccatattacaagctgcaggaccaacttatcagaccagaaatcaacccgtctccaaataaaaaagaaatcaaaactatgaagactattttgatatctggatttatgttcaccatcattaatgatgaacctcccaatgagcgctgatttacttacagacaatgcccaatggatgggggcacatgccaaaaacatcagagaccaaacgtcattccccaactttgttgagggttctcctggcttgcagaggcagaggaggggctgtggtctggttggtgggtttccatgggagaacagcaagagggggccacactcaggaacctcaagacccagcccttggtaacggccttttgtggctgaggccaatgagcgtatctcccctcctaccctcttcctcatatcagctgcagagttggggctccagaggaaaggaaaggggtcccttggtattcaggaccctgattcatctcatttacctcgatggcagccgccccatagcccacacctcactgtcccaccaattcactaagaaagccaaaaggaaagtgtgaccccgagagaatagaacccaggtccttttgttcccaggctcatgcattataccttggccaagatcccctctgcaggccacacaggcaggatcttttcccgatgattgaaaaatcaaggcatcttcccctgcaccaataggagctaattacagagaacttgccacaggccaggcacgtggctgaacacttgacccccatcatctccattaatccccaccacaaccctacaaggtaggtcttattacctattagacagagggaaaaactggggtttacagagagtagatcattttaaaggctgcagcccagactcaaagccaggctccagaatctctgctcccacctctctcctgcttcccacagcaattgggcatgccaaacttggagaaaaacttaccttcgtcttatgaccttggacgagttactctctgaacctcggaccctcgtgcataaaatggggttataataggacatactgcattgggcttttgtgaagattaaatgagttaataagtgtaaatgcttcaaacagtgctgcacacatagtagctgctgtattggtgtttgcggttattattgccatcatgactgtgttacattgttctccctagtaagttcagtttttcttcccgtcgttccctataagtgactaatttttatccttttatcctagtcttgatccttgcaacagaccaagggagaagttgtgcattacagaggacaaagactaaattcccctccctaagcctacctccacctctgcatgcaccccactgacacatagaggtctcaacaaatagaacgacgacctcagtggtgcagaaggaaggagaaggaggcttctgaacaaggcttccttcagcccctgcagggcccccatgtggcaccgccaagcttctcctctgagcaaacctgccagatataggctgatctaccagggctccagacacctggagattaattagaaggccagtccttgggcaaatcagcccagaggaccagccacaaggagctgcagagagaggctggtaggctgtaatcctagagccagccacggagctatgcctggtccagcagctatggcagtggcagcaactcatacaccacccctaagcgaggaaatgctgccctaaacgtatggctgacttttacaagtcgaaggtcccaactccaggaagttagggcagaaagagacagtcatgaggaaagtatttctgaagaaaagcagattattttgagcacgaactgctgagtccccactctgtgtcagcctctgcttcttgccaaggagtgttgctaagctgatcttcctcccaggagcattaggctgatttaaaagatggcaaggaagcaagcaactagagaagtccgggaagccttgaagcgacaggttacgtataaactgcacttgggggctgctgcctggaggagcgagctttctttctggattcttccaaagggcagaagcagggcctgcaagtggaggtcagaagacagagatcttgatcctgtctgagaccacgccgtccacagggccagcctggcaatgggtcaagctaccccagacatatccaggcagcagccaggtgtccttttcgtgtgcaccagactcccctctaaggcaggaggttggagcaagcaatgcctaaaatgagctcttggctgtgtctggcacctaccaagcacgacaaatgaaaactttggtggaattaacaatctaatgataagatttggtggttcttttttggcctgacacaatgaaagtagcctcttaggaagaagccttaatcctctaagtccatacattgccctgaaggggccattttcagcacccaagttcctatttcaaaaaagttaagatgtgctttaagggctttagctaggattctctagttagagacaaacaccagaagcagaactgcagggtgtctcgggactgaggcacatgtgcctgaccagacccggaagagggtgggaggcatctactcaacatgctctactgtgctgcatggaagtgggagtgaggaaggccagacaggaagagagaagtgaagccaggccctctgagagtgaggtgtcaaattcacaatgacagcaaagcctctggtaagaatgggagctgggaaattcttaaaaaaagaaagtctttatctagatcaagcccttcctcaagccatgaccttctgttgtcaatttcatggagaagtgcacgggcagtgggggccaccacaacccgcacgctcagcctggacacacagcctgggatcatttatcaaaccagcagaggggaaaatcccccagcacagagcaactcctctgcaaaatgtagagcttcgctgatcctgcccgaccccaaacctgctcacatttcaagtcctccaagaaaaggatcagacaatcgctgtcctctcttgcttccccttctccagtcctcccaatgctgccacccacatggaggagaaatgtgtaccaggcttgcagacacagggtggcagtggagcccttgcctgcttccacgagcacctgcaccaccttcctctcatgagcccagagacatgtcagtgtccacacagcagcccagcaagagaggaaaggagtcctggtgctcccgaagcggagacactcgggccccatgaagttatatgatcagcacaaatgcaccggcaaggtcttaggcagaggcagtctgaagcctggagcatcaccagcttcacaggaagggaatacctgcttccaggcaaggtgaatggaactgaagtgtccccaccgtcaggaattcagacagagcaagcaccaagattgtaagtgagcattactgcaaaagcattaaagttgggggctatacctaaggctgccctggactccaggcctggctctgttatttgctcattgtgtaaacctttgaaatttctgaatctctcaaacttactttatctataaaatggatttcaaaaatagaatccatccctcacaactataaggtgtttagcatctgcccctgcacatgataagcagtgggtatcatattatggctggaagcaccttcaggccaggagagccaggatgctgtaggctgctgccgcaccccttgtccattatctcccggcttcccacactttgattccagctgctgccatcatgaccaaccagaggcagaccttgttcccctcctaacatcctgccctaagcacgagggaaagaaaatccctttccttggctcctctttgaccaagttgacattgtgaaaagcagagaatgaaaatctgatagtcacagaaaacacaaacacagtagaaataattaaagctcctgaatacaggtttcagatcctgtaataactcacatcttctatgactttttaacatcccagcccctgcctgtttccctgtgactgctgccaccctctcaccctccttgctcttctctctccctgctacaaggccccaggacctattgtgcctacttaggatcctgcctctccatcccagggctgtgggacacagggagtctcaagagattgacagtggagtacaacccaagtgagactctgtccctgccacaaagaccgtgccctgtccaaggccacgtagagccatacaatatcccttgatgagtgtgctgtgtgtacatggggagagggacagaccctccacctgtcttcccagagctcacaatacattccaaattaccggcagttacgaattggagggctccagtcagtggttctcaagttgcaattggtccccagagcagcaacacctgggaacttatcagaaatgtaaatctcaggcctgcttcagacctacaaaatcagaaactctgtagctgggttccagcaatctgatttttccaagccctccaggaagctctgaagcacactgaagtttgaaaagccactgacctgttatagtccggctagctgcacaaccttgagtaatacacttaagtctttccatctgtaaggtgggaccaaaaccagtttcatcatgtgttaagtgggaatgatgatggaacctatttcacagggttgttggttacaaagattaaataagaccctgcatagaatgtgcttagcaaattgtaagcactcataaatatttgctaatattgatcttcctaaaaacctaagagatgagttcttccacgatcactaggcaactatcaaggatctcagtgaaggcttagagagtttttgaaaggaatcgttcaaggtcactcagctatcaaagatatcttaatagccattccccagagaacagagcagtgttaactgaaggcaaggtgttaacaatgcctttccttctctctgacttgcaaaaggtctcctctggggccatttcccttccccgtgggcatctagaaatgtatggaggctttgtggttgactgagtgctcttggcttttaggatccagagggtcagggatgctcctcttgcactgtgtaagatggctctgcataatgaagaagcatcctacttacaatgccagtgacatctccactgagaaacactgatcaacccagagtttcggagctatccagagcatgcagcatgtctctgcctagagaatacgctaaacaatcacaacaattgctgtggagggctggacgtctcatgggacacgtctcctgctcaagtcctactgtggatgttgcgagggccagctctcactctagacatttcattgtcttatttaacatgcaattgcttcaaatctcatttaacatgcaattgcttcaattgccctagctccaatcaccccttcccaaacctgggctagatctccagctccgtgggcccaggcaaacattttccaacacggtgttagtaggaattccccaaatttccccaaagttcatacaggaaatggatgttggctcaagagagcagaaggtgtagtgtggaccgttctttttttttttttttttttttttttttttgagacggagtcttgctctgtcgcccaggccggactgcggactgcagtggcgcaatctcggctcactgcaagctccgcttcccgggttcacgccattctcctgcctcagcctcccgagtagctgggactacaggcgcccgccaccgcgcccggctaattttttgtatttttagtagagacggtgtttcaccttgttagccaggatggtctcgatctcctgacctcatgatccacccgcctcggcctcccaaagtgctgggattacaggcgtgagccaccgcgcccggcctggaccgttcttaaaaactttgtgctatttattatttgttactcagaaagggagacggaggtaaggatgagaggagaatgttggtactgttcagaaacttaacaatcctggctgtcaaaaatgccaggagtgaatgtaatcagtagaatcaataaagatttatttcaaaggattcccaaggaaaaagtgccagacagagagccagaggggagaaaagtaacagcagcacacaaaagcatgcacgattcacaggtttcccgaagcactggatgaaatgtggcttggatgaagttggccatttcccctaacttaacacctctcttcccatacatagcccctttccctagagactcctacctagtgctttcaccagcttccccctccccataagagtagcaactgactgtgctaaaatgttccttgccccacaaaccattaagctgtcaagctgagttggtgaacaaacccagagagagccggtgctgctggaatgctaacggtgaaaaccgcaattattctttctgctctggacaattcctgcttcaactttactggccccaggtcatattttgtgatctttggatgctgatggaagagagacggcttgatagagaaaataaccagggagattatgtcttgatagagatggaagtaactagtagaggttttttcgttgttttccttttgacatccacataggtgtcatataatggcttctggttataaagccccctatccaaaggaaaaacaacttctccataaataccttgcccacgtcagtgaaatagctgtgttacacacttgagcaccattttcgaggacactttaaatagagcatgggttgctgctttcaatttaacgtgtgaacaggagctgctaaggcaggcagagatgataagttgtggggatgggctcagtttccattggtgcatctgctcagattctaacagatccgcaggcatttaaggcatctcagggacaagccaggtaagccacgtgagagactcactcaacaaatgaatgaacacctactatgcatgagtaaaaccagatgcgaatcacttcctctagatgaaatgggctttacatacaaattataacagttccaggaaaatctaatatatgtttagaagaagaggtgctttaaaaaaaatgaaataggtggtacatgacaggtaaaatactagacaagttcagaggagaggtgggtggtctctgtgttttcttgtgtaacaacctctactgagttttatgagaattaaaagaaataatacatgactggtgcccaggacagtgcctggaactaagtaagcacttgataatgatagcagtagtcaaacaagtaggattaatatggttgacattaagtttttactgataattttaattataaatccagttggaggtaaagacaggaggattatcagataaagcttggtaaataatgggtaacatctggacagatgaagatgagggcgtgggggaatagtataggccaaggtacagatgcaagaaaattaaagacttgctcaggaaataacaaatactacaatgtgtcttcaattttctatgtttgtactgtgacaggtctgaatgtagatttcttatttaacctgcttagagtttacagaccttcttgaatctctgtattgatattttctccttgttttagaaaattcatagccattacctcttcaaataatacttcttcattttttttctttctttgtagaaatccaattagatagataagactattctcactgtatcctcgatgtctcttacctaagttttctgtatttattatacttcattttggatgatttcatttgcccactgccctacttcattaattatctcttcagctatttctaaattatttaaaatacatccattgaattcttaatttcagttgctgtattttttcagttccaggatttctttttggttcttgtttgaaatctactatgtcatttttatagtttctagtttgctgccaaaacttgtaatcttgtcttatttctacttgaaaaatagtaagcatggttattttaaatccatggtctgataattgcactggaaattatccaggaaacctgtgagtctattatttctgctggttctcggtcatgttgacttatttccttgtgtgtcagcttatctttgattacatgctggacattgtattcaaagatttatttgtagaaataatacaatgactaggataaggtatcttcctccagatagtattgtttgcttctaccaggtaactgacttgcaacatagtgtaacattaatcccatttcagaaattgtcatttttcttagctactcaagggattcaaagcctgacttcacaacttgcaaaggctggtttacttgtagttccaacccaaaatgttcccatgcttaataggccctggactccagcttgtgtcctgtaatgccctgatgctgtcaaatgcattgcttagaccctcggctgcctctttagaagccagcaaaagtctaatccctctgattagttaacctcttgatttccagcttcttccaaaatttggccctatcaatatttaccaccttactagctttcatatgtcttcaagcatgcttttgaaaatatcttctccactttctgaatttttatcagtaggaaggtcagtcaattgaattagctagtctgcctttactagaagcaaaaacctcccagctggtatttgatttgactggaacattggatttacttttgggaggaaataaaagataaacccaaacaataggccagttccaaaacatggataaacttgaatgctaggctaaaaaggaaggatctttaataagcgatggggagccattgaagattctcaagcaaaggagttctccttgggagctatacttgaggaagatgaattggacacttacgtgccaaactgattagaggggcatgagaccaaaatcaggaaggagagttgactccttttatcaaactttcagagaagaaggcaaactatctgagctagggctatggtggtggcaacactaggaagacagagacagatgggaagtacagggttatttcatgagtgaggcacaccaactagaagatggtaacagaaatcagaatatggaaagaaaaccagatgaaggacagagggagaaaagtaaaatgatatgatttgcccattaactgagagtgggattgaaagagaaagaagaatcaaagatgatattgaggttttgaacatgggtagctcagacaagggaaagagattatgagggctaagccacaacccacccatcctctttttagtcatgagacagctcaaagaaaagatctgtttcaagtaagtgacagtggccactctccaacccaaaaccctcccagaggagagatgatttcatatgagaatagagaacctacccatggtgtcactacaatcaggcaggtgggacaacctcttggagagtcagagagcaacccattttgtgatattagagattctctaagtgaaattggctgacagcacaattcccgttttggggaaggagaaagctcccagagccacttgttagtaacagaggtcctggagcattggattacaagccaggaagttccatagaaaagaaggagcacacagaaatagacttaagtgtgcagagggtgaggggggcacaccctgtcactatgtgacaggtgatccatgggggcttctaggattctcactattggttctactgagtgatgaaaaggtgcccattagggttaacttcccaggtttttaggtagggtccgaatggagtggaaatgtaaacctttaaataattatggctttcttggcctagatgtctgtcatgcactacagatattttttcctcccttccatgtgtatgagtgaatatcaaaagtaggtacctgtaaaaaataaaaatagaaaactttcactttcattgcaaagatcttggagatgaaataaaataaaagtaaaatgtaacttgggaaagggctatataaatttcacaaataaatgactgaggttgacattgatctgaactggacctgtgctacaatagaggggactagtacagccacaccaggcaaagctctccacacaacctgtttgcttttcattttcttattgtctacaccaaatcaataagatctgcaaaaagcaaatgtagcaaatgtattttttttctccctattctgtaccaggactcctctccggcttcagacctggaatttaacaggatgaccacccctcccccagtgtcctctgtgctcctattgtctgccccaagaaagctcctactaattctctcaaaaggaccttacctcctgcagttacttcacatgctcctgtgggcagctttaatttatcccagtggaagtcaagatgtaggtttgtgtagaggcctgggaaacctatcaaaggagaatgaggttgaacaaaaacatcccagggatagactctcagctccctgtgggttgggccatgtttgccactcacactgaacccccagcacctggcacaatacctagctcataaaaaaacacactataaatacttgttgaattgttgaactgagagagctgggatgagaaaaacaagccaggcatcactttcttgtcaaataatccttgtacatttgccacccaaaggcagggcaatgggttgacccaaggtttttctttcatgaaacagccccaaagagaatcctccctataaatgtgctcattttttctctccaaatgcctttattccagaagaaagcaaaacagtgagtggatgactttcatttgttttttgcaggaaaagaaaaaaaaaatgaggattaagaaaatttggaactaaggtgttaagaagtgtaatagggtagaggaggctaagaaaaaccagtgttgctgtagtagggagaggtttgactgactgactgacaccatccaccacaaagtcatcaggcacctgcgggcctggaccctgcaggaggtggctgggtgtattcctgctgactgataggataactatgcacattcaaggctaagaagaggaccagcagttgccaaccaacccccaaaactgaccagtgctgagtagtcagtcacctttgataaccacaatcatcattagtgagtccaacaggggactggctttaacaccaacccaaatgctcagaagggtgcatttgactagcttgacctacatctggttcccctctgtgatgttttggccatcacccaagtacttgggatctttgtctctagctagagcttcaggaatagtagctcacctactcctaaaactaatcttcagaatgaaaaacaatggcagcactgcagaaaaagggctaggatgtggaaatgcaggaatagatgcttccaggaccacaaaaaatgcagcatctaagaaaggacaagtattagggatccctttcatatggtcttgatcttccctcctgctttgacagttttagtgggttaaatatgctaccctgttgggaggtaggaactgagagactaaaaatcccaatgcaccagtaaaatttttttaagtccagagaaagtagaactctggtgaaagccatttgtaagcatatctccagaatctaatatatctgtgtggccaaaaacagtgggcactgttaattcacaaccagacactcactgagactcaggaacagaagggggcaggtgctggtaatcccttgagtgctaagcttttttaataatacactggagagcagaggggagaagaaacagcattaatggaaatgattgaaacaaatgccccactagtggacagtgatcttgttttgggcttacaaaactgattgattatcagatccaccttaagcctcccttttgagaaggttctccatccccacccttgctcctaacacccttgtcgattctggttacatcagtctggaacaagggcagggactttgtaactttcaaaagttcctcaggtgaatctgaggacaaacaaggcttaggaatcatgggtccaacccatgagattcacaaaatgaaaatatgcaagtcaaatgccaaactggcccatctggtttcactattccaggaaagggagcccaaaaggatgctaatttgttacaagtggcctgaaaaatacatctatgttttaaatacttcctctcttgaaatagtaaactgaattacagcaagctagctccatggtgatattttccctgattccagttcacagagagaatttaaagtgaaaaatccttttcaaaaggaagatacaataggctgtgctcttcaatgatgcttgctctgggcccagtactgatgctgaccacttcacacacgtcatctcacgtaatctgtaaggaaggcatcatcacccccatcttacaaatgaagtcactgtctcagggagatttaagtacatttgcccaaactacaaactggtgggatgtgaattgaactttaatctgatttcggagtctttaccttgaagtctatacagtatgttgctttcttaaacccccccacacctacatctctgcttcagtttctaggtctttgtatgtcacttaacaagcatcccctccatgccaatgtggttgcacccatttcttcgctagggtgctcctgaatgcatgcaggcatgggtaagtgtatagtgagtagtaggagtcaagacaagaggctgggagctgtctggggctcctcctgggatctcctggtggggtgcagaactattccagggattccaactctggcctactgtacagaagaatcaagggacagacattccaacagccaggcaaaccagaaccacagagaaaacagggaggcagtcaaagccatcaggaccccacaaatatacccaccaggagaatcaaatcagggtctgcggaggcaacaagagagtttgttggtggcctagatttttactctttggaccactctgtatttcagcttcacgcagcagcttgcaaaagagccctggggatggcaagaaagcagaaagcacctctctttgtagccacaactacagatcccaagaccactatgaccaaattaggacagaaagccttcagtgacgcacacacaggccctggggagtctgaacacgagtagatctaatgctgttgaacaaaacgtgaaaccgaagaaaacacccagccacacagagccctttgaattggtggcttcactccagggctgcaagtggggagagagtgaaaagagacaaagcctggctttggaaagtctcaaaagagtttctaggaatgccacgtcccaaatcctgtggggtttgtgaggggtttggagagtcctgcttgttgaaaagcacttagttgtcatagtagaaagtggagttctagactcccctagccctcattacaaatcaatgagtagagtttaattctaattgtgagatgactgagaaaggatttttatgataagcagatgaggctagggcaatttcaagtgcaagtaaggtctttatttattggctttttaaaaaatgtcccaccattttgtatgtatttgggggttttgcttgtggagagagcccaggagtgggacatggaggtagacaacactgataacagtgagagacgctgccaggcagtctgagttctctgttcctagccctgggccaagagaaatgtgctctgacccaaggttaggcatgttctcacccaagaccaagaccaaggattctcctaaacattccaataaatacccaacgtagcttttaaaccttaatctgttatttcctagtttgcagagtaaaatataccctgtcagaagtgtttgaaccagagtgactccatcttgaataggggatgggtaaaatgaggctgagtcctactgggctacattcccagaaggttaggcattcttagtcacaggatgagatatgggttggcacaagatacaggtcataaagaccttgctgataaaacaggatgtggtgaagaagctggccaaaactcaccaaaaccaagacggtgatgaaagtgacctcgggtcgtccccactgctcattatatgctaattataatacagtatcatggtaaaagacactcaggccagcaccatgacagtttacaaatgccatggcaacatccacaagtttccctatatggtctaaaaaatggaggaaccctcagttctgggaaatctctgccccttttctggaaatctcatgaataatccacccctcgtttagcatataatccagaaacaactgtaagtatactccatcaagcagctcatcctgctgctctgcctatggagtagccatttttttactcctttactttcttaataaacttgcgtttgctttactttatggacttgccctgaattcttttcttgtgtgaggtccaagaaaactctgttggggtctggatcaggatgcttttctggtaaggcccctatcatcatcccacctaagaaaacaggaatcccagggaacctaatttcccctcgtacaaaatatttattaactactcacacccttgaggtgtcttggtaggaactgaaccacttagttcagacattggaagtgattccaaacttggctactcatgagaatcacctagggaacttaaaaaaaatcctgggtcccaaccctggtgatgctgacacatttgggccctcccaagatttttgaaagctggaaccatcaatgcaggaaaaaccttaaaagtgagtggaccctaaaatcttcctgggggcagatttccgtgcttctgggagggtcatttccctgagtcattaccctccttagtgttctggaaaatggcaaagtacatcaaatgcagggaggattcctcagcagtcatgacaattgctatttgggttaagttactgctacatctttaatattcccttggggtgagttgtttgtttgtttgtttgtttggggagcagcatgggggctaggatttttttcttaaaatgactttagaatgctcagcttatttttgtggatgggcagacaagttataattcaaaccacagtttgaacattaggtagagagaggtagagttatagtttgaaaattaggcagaagaagacagcacaggtgggtgagatcctcactttacaagaaggtggaggctgagcccaggatccagttgcagtttggagcaccaacccagactttggggttggaaccttgttctgctgtggctgttctgtgggttctataaggctagggctataccccacctgctgcccaagggtaaggtttaccctgaaggaagtgaacgttccctaggaagacaatgaaggctggaatgtgggtcttcattgcaactcagagtacccctgacccccacagcatggtggtgagcctgcccttcctctagggagcaggatgcccaggagtggggcatgaggcacccacaagtgaggacaggtctaagcctggagatgcctacagtggctaccttttgaagaagtgttaagttactctctgtgtttcctttattacccttgatccatcaaaaaaagttgtattcagacatacagcctgatctctttgtgctggaaggaatctggggaaggacctcttccaggctaggattaacagggagaatagcaatgagagggaggggtcagcatttcttcagctgcaggaggcaattagtagacacttaaagaggatctgagcacagctcagctaatttaaaaaatcagcataatttgagttttaaccaaaatatgactttattttgtatttgcaaggcaccaaggtctgctatacacaattaacctcccctgtcctcccctccctcaaggcttctgtctgacagactcagcgggaggaggaaaggaagagtccagctcctctgctgctgatgaccctaatagtcctcctaccccactgggctgcaatgaccacatctgcacctatagtccctcatccaatttgggacttattgcagtgcagaccttaatcctggtctctccctgacctcctggccactcacacacccagtatatctccatgctgtcccatagacacttcaaacccagctcctcaaaaacaagccccacctcttccttctcctgcattctctccctttgctagagcacaagcacccactcggtcctccgtgcccctcagctgcctcatctaattctcaccaagacccacttctgggcctctgccttcccttccacttagtacctcaggcccagtcctcatcatttctcccttggaccacagcagcagcctcctgacaattccccaacactcaaagtgcagtcctggcatgccgaacttggagacagcgagcttaggtgcacacccaggtccccagagcactcagcagctttcttcacacattttctcttcccttctctcttgaccagatacagaagagccagtgggaaattgagaagcccttaacaggatggtggagccacaacatggaaggaacctgggctcctgaatgactgtatggagcaaaatccccccacatactaacccatattgaactgtggtggtttgttacagaattaaccagccatgattaatagtgagcaactcaagaacaaaaagaacaaacctataatagaaaagcaatgcttttccattcacaaacctttcattacaaaatgccggtcgtgtcctacagccagagtagtgagtatacctcgctggaggctgcaagggccagccagtccccatacacaatcagagctctctgcaaaagacgtaataccaccagccctgtactgtactctctcaattgccctctagtttccccaccccaatattgcagtgtctatgatcactgaaggaaaatgaaatatgattctaggtgtcacctttcaaagggtgttagtgactgtcagctaaagtgatttaagccccggaaaaacctctgtgtccttttaacatccaaaactaatcctcttcacaccagacatcgatgttaaataaacagagatttccattaacctacacctctgtacatctatttttaaaaagcggtgtcactctcctttaaatgaacatactaattagtgtattaataaatagctgaatggaatcaatgagacatgtaatcaaggtctgaccaggagtcagggccaggttgaagggggtggggggaaggagaggagggaaaagaatcttattagcaggtttgctgaggagggacatgtaaaatcaatgctgcacatgcagccaagatgcagccgaagttgacagtagatggaaagctaagtgcttgctccgcctccttcctttgacaggaaagctcccggtgagagttaatgtgatgagcaaggaagacattaattggggcaggaaaagccattcagagatggtgtccaggatcacagctggcagagttacccagaacctcagtgctaaagccctgactcctagaccttgttttaaaacactaagaaagaacacacttacgagagttgatttagttctcagcaaacacttggtcaaaaagaagtcacagggggagttatttgtttggggctctttgttactcttaccccccttcaaaaattctggttcacaagcagtagctggaagtacctttgccccaagatgctaggcactgggaaatgaagggcctggattctctacaggcagccctgggggtgggaatggggcagcccgcttcttcatcagctcccaatttcctgtagcacaccccatagctagaaggctctggaaggtgagaataaaaagtccttctgcaagtgtgaggtttccagctgaagtggtatctgattacccgagccgctgctcactggatctcaaattagcactgatactccattttcttcatctggagacacaccccctttgggccacaaaacactggacagaagaaaagtggactttcatttccctaaagattaatatcaggagaaatgcctttctgtataaaatcaattaggtgcctgagaccctcaccccaaagccagctcagtgatgctagttgaagtagaagttgtgttaggataaaagaaactcaaaaaaaaaaatttgccttggggccagtactgcccattacaagccctcttaggggtgattctgccaggaggcaggggattggcttgttagcagttagaatgcttggctcaggattctggggtgctatgggctcccatgccatgaaactgaagttcttcctaattctggttgctggaaaagccagtatctctgggtggacctcacaggcagaaaacctgctgctctgaatgcctagctctggcacggcatccacacatggatgatctagaagccttgcagatgcgtcctgagatatgtttctgccagccccaggcatggcctgcaacctgctcaccctgaggtcagcatttcctggaatgacagggaggacacacataaaggaagtgtggggacatggcaggaggcagctctcagcagcccttaggctattttccacattactgcgaatggtattttgcccccaggaggttcataacagtcagaaggatctccaggttccccagacccatcagaaaagccaaggggtgatggtcatcagcccagggggagagcttcctgacagggtacatgaaaattaagtgcaaaagaggggccagagacagctgtcccccagctcaatctgaagcacaggcacctagagaatggccacacataggaccttcccatctggtttgagaggtcctagcaaagcacccctgcaccagtccatatcttactccctccattgacgtgctaaaagtctgccactggaacatggtttctttgggtcaagcatcatgctttctctttcaacaacctacaccttagtgtacctcctccatcacctctgtttttctgtggcccaaggataaacagaagagagtggagagggtgcaaacagcagggtccccactgatctacatggctatttgctgagaattagggagtgctgtcctctctggttgaccagaacttggtaaacagaaggcatcttgggggaagaaaagggcaactcttcctgagcaaagagatacaccaagccttggccaataaaacatgagcagaatttcagcccttatttgctcccagctcacaggtatacacactacagtgtatatcaccaaaagccctgtctaaagaaagaaagagagaaatagagaggagatacccaagtacttggggcaaaattcaactatttctcaattttgcccaaggatacccatttggagatagatatagatatagatacatgactattttcaaaccaaaaatatcaggacacacactcaagcaatggcacagaatatctgaaacacaggctgttctagtgaacacagggcctgtggtcactgtagaagggctgaagagtagaggatggcagtgacaaggaccctggggggacagtgtgacaatgaggtgccccttttcctttaggggacagagaagcaatggcaaatctccccatggtgtgctatgtggtggaaagaccacctccacaagaccagagccggactctctgctcacagatgtcccatcaccttcaaaatacactgacacactccgtttccagagtctccaagcttttgttccctctccacaggggcaaatcacctttctccacagtcaaccagtggttctttcctctctcagcccgagtgttgctgggaataatgcaatgtttccagcttaatcgtttgtcatcatgcagagatttcactgatttcaaagctaaggtgcctggaagaatcgagcacgctctgaaccagggtgcctcagggcagagggttctcactggctggctggctttacacaggagaatcccagaggcccttactcaccagtttaaggctatctttccaggaaaccagggcctggggctgaagacagctgagatgggcagtgttcataaatatcacctattggaggcaagtgaggacatccaagtatgcaaacaccatgtacactgaacacacctctctggtctctgatggaccacttcagctttctgacttcgttgcaggcaaacattagcagatgccccatcctgcaatgcttggcataattatcaggtaggctccaggcaataattactcactaatggttagccactgctttgagccaagagtctcctatctgctctccctacaccaaattcagagtcttgggtggtaaacctgaaggaaaaaaaaaaacaaaaaaaaaacagtaaccatcaccatggcctggcaaaaaaaccacattatctaagatatcactccaggtcctataaaaataacgtatgtttacatgtggatggctgatctgagcacagattgaatatataaacgtggctgttaattctagactctgagaaaattctgagtcttccaaaaataaaggaatccctacaaatatttttaaatctttttttaagaggtcatactctgacagagagccagaattaatgcaatgggaccagccacctgctcttcttcccttcccatttgcttatagaacctcaaggcagtagacttgttgaagcccagtgttagaaacagatgtgactatttataaaccaagaaaactgaagtgttttaatccaacacagggtggcaagaagcagaactgacaagctttaggaatctgaagaacaggcaacaattttcaataatattacctctccacttattgagcatttaatatgtgtcaagcagtgtgcaagctatttcccacgtattatgtcacttaattgttagagcagtcccttattttactcttttaatgataaggacactgaacctcagagaagacaggtaacatgctgacgccacacagctgagtagccaaggcttgatgatgtctgtaaattactttaaaatgcatcagcttaaacagagtggtataatgtaagttagttccaatccttacccaaggatggttagtcgacatctgaagtattgtaactaaccagggctggtgacttagcctttgaaagccttgcatcagagtctacactgtttgttaaaaaacataagagatgttggaaacaatttatcagcaggaaattaagcagtgtcgaatatgcataattggttagaaatgccatccaggcatctctgccctttgggcacaagaatctggcaagcctagagccctctgtggctccattcttggcctaggggtcctactagggtctatttcatctctcaaaggatgctgtcctctaatcccactagaaggtgagctgaaacctgcaaccacattgccacatctgcctcaaataaatcttccttgaaataaacttgtaagagttactaagtcagtgcctcccaaactttctcacttcctgacacttgcagaaagtgataatatttttaccacaccctggggccagagagggagcttctgctgctgcatgcccctcgtgccctctggctgtccacctgcagggttgaggtgacccgctatatcagcaaaccttgatacccttccccggcacactagttgaggcagacagcaggatccacactgagcttcaaaaacaggctgtatggctatttatgtgcctggttactaacaaatattggtaggtagggtagaattgagtctgcaacttgcttttgtaggaaggttgtggaggagaaggcccatagctctcacctgcctataatcactggaaatgagtccccacataatctgcccattgggcatggccaagttggcattaagttgggttgcagtgccagacctgtctgcctccaaagtctatcctgggtcctgggtgctcccctgcttctggagcctaaagaaagtgaatcaatggttatttgtcaaacccaaaagggaagctcttcagaaaatgccatgtcaaagggttccgtccttggcgctgtgctgtttcatacttttatccgtaagttgaatgaagactgagagtcacatttatcaaatttgcaacggacagattccaggacttgtgaaggtcaaatgagataatatgagagaagtcatttaatagtagagtaagactcaacccattgatgaggatgaaacaaagtttaagactatcttagcagcctgaaacagggtcaaaactggaaccccaaaaagaaattgaatgtgacaaacataaattcaaattttaggcttcaaaaaatattaatgaataaagtaccaggtggcagaagtttgtgtaagacacacatataatgagggtgggagaagcttagagacccactggttacgaaccagcagtgggatgggggctgcccagaaaccctgccacatgaatgaattttgacattgggctttgctatccacacctcctgcagatggtgacctgcacctgtgatcagtcacaaaattagatgtggagtcagacctacctgcaccatgagaagcaatgagctctccatcaatgtgcaaagcagttaaaagagaaggaaccctctatcacgtgctactgaagttgagttgttcccatcccctgcaaaggctcccaacttgccagcacagccaggatgtttggctcagagaaaagaggtggcaggagagtttatcaaaacctacaacttaagattttcttcacagaagatggaggaaatggcggcagggggggacgtaaagataggcaatcaattaccaaggagcccttgaataaaaatctctttatttccttgaattttcctttaatttatcttttttttaaaaaaaaaaaagttttcacctttgcaaaacctttggactttttgaccaaagacaacaggaagtcagccaagtttaatggagttttcattttgaaaaagatgttatctgcagctcctctgtgcctaccaagcaatatggtacgtctgtggtctagagaccaactcattaggtgctctgtttaccatcagctggtgaaaaatgataattgtatggaagaataatcaccaagacatggacatcactgcctgcagacttcgccaggaagctacttcccacttcctgtagatccgcagctgtttcaggatgtgtaatgccctctactgtcctaccattcaaatacttctcttttcaagctcagaaaaccaagtttaaggtagggagagagagagagagagagagacaatcaaacaaccttatgttgggtccagagggaactgcaaatgtgtctaagacaatgcctgctttcaagaagcttgcaattaagtgggaatatgagatgtaaatactgaaaatacaagccaataaatcatatattaccaggaaattcttggcaggctgagttttcagaaagtctctacgtgtactactgtctgcacacaaaaatgcccagacctggcatgtggctaagtctacttgtaaaatttgttacctggttaaatgctgttccatgcctaccaatatttttaagttttcaaatataagttttaggtgaaaatgccattctttcaaaacagtatgtgctggagaaatgacattttttcaaagcaaattttctatatttggtcatgtgatattctgtaagcttttttataaaggctctttagaacattccaaaaatgagcatcatcaaattaaaacaagagaacttctattacattgccacaaatcctagatgtaaataaaataccatttcactcaataatgattgccagaaatataaatacagtttagaaaaattatttaattagtttatttttaagtatttgccaagaaggcttcggtcttgctagtattaagtcctgggagaaggaacaaaggagagtgaaatgagctacagcaacttcatgcaattgggcctgggtttagcaaagctcactctctctcctccacacccccaacaatcggcctggggccaatgacagccaagattctttgtccaatttgacatcatgcacatggccagtaccccgcctctttcgcctttgcctgctttcttagatcttctcatccgagcataaagccagcagcccctttgaggacatctgataccccaggtcagtaagtagtctctaaaatgaaacataagaaggtggtacaagaaaaggggaaagtgtagggattccctacctttgttgcaggctctgagacagccttggagagggctcagctcaccaatcccaaaggccttacccgcagtggacaggggcatggtgaggggatgtaacaaggacacccccggtggcgtcaactgctctattccagtcctgaccacagatcactgtggttaggttactttccttcttagagccccaggccttgacctctgcctcctagtaaggaaacaatgtgccaccagataaacttggagaaactgctgaattccctgagaccaaaagtgcagctccgtaaatgtattacatgccgagaacagttgataaaatgtacaagggctgggaaaagaggcatgaggaggaatgaacagaaatcctgccacctctatggggtttttgaaaggttagagctcaaaaacacttaccctgccccctgtttctccccacaagacagcccaaagcacaagacaattttattagcagctctgagatacccagaagcaatccagagaagagggtagatccatcgtttcacttgatgttgtactgcaattttgcagctaaagacattctttgggcctgaactcccggggtccctcagtcttgaataactggtataaatgatgcccgggctagtcagaggccctgcactgtctggggcctctccccatccccaagtctcactaccttccgcagcagcacagagggttgaaagtgtctgggaagacttgaaggagttgagcatatctctctctctagcactctgctcaaaccaatggcctgttctctgcagttcctatgacatgaacactgtaatggaacacaggagcccatgtctacatctcctacaacaaatgaagaccactaaattataaagctctcctgcagaatgcaaagcatctgtcactaatatgctaacccattcattttttccccatgtattggaaagagagagaacagatactgcttgggttttactaagccctagactgtgtctgctattttaaaaataccttcatcatagatgtgtgaagcaaagatatgagaaacagggggtagaacctggagaggggctgccccacctaaaggcattcccatgataaaaatttttccttggcacttgacacgcctggaccaagccaaccctatctagtcgccaggtcctacctgcaggctttgattgtgcagactttgtcctacctcccagaatgtgggattagaccaacaggacattattcctaatgggcaaggtcaatattttaatcaccaatctcttagctcatggtggagttcatttccctagaccacactgttttgagcatgcgctcattgaagttggaggcacgcaccgaggaagggaacaagcagaacagaggcccaggtgcgctctgttccaagcttgctctatagcactctgggtgctactcaacctcccgggattgttctttttccactggaaagtagtgggactctcctaagggaaggtgaatacctgggatgctttcagaacaatttcaagtacattgtccaagacagtatgtttacgccgaaacatgaaccacttgaaaaatgcaagaatctctaggtggatcttcttgcttctttgtcaagtttctgccagatcccaaaaggaactcctaagtctgcaactgggtccagaagtaaacagcactaggtaagcatgaagttgaagctgccggggacacaagagccttgtatccgccggcctcctggtcacttccgcctgcaaatccacatatgccccaattcaccttgttcagaaaagaatgcagcactcctgccccaccactcccccgacagcctgcctcagtccagatttctccagctccactaatggcatcatctcccaccagctgcccaggcaagacacctgcaggacaaccccactgcccgttccttgctgcccaccaccttcaccgccatatccaccatcatctgtcagcgctaattcctacgatgcacttctcagatcagcccctttctctcctttgccaccccctttgatcagccccggctcaggatgctttgatttactgcaatagcctgcttccagttgttctccacgtggcccccgctgaaccttgctacagtacaaatctggtcttgttgattctcttccttggagatcgccaaggcctgactgctgcctgatggataaatcccttagctggatactgacactggtcctggtgcagcctctgccgtgttgccccttgccccacttcccacctctgccttgaactcctgcagaccccaagggctgtgctctcacctctctgtgctgcttcctccacgtgggacctctgcttatgagttcacaaagccaatctgagggatccttcaaaacatcctctaaaactcaactggatgcccctcttcctcctcctcctccttctcctcctctttctccttcttctcctcctcttcctcctcttcctcctcctcctcttcctctccctccttcttgtcctcctcctcctcttcctcctcctcctcttcctcctcctcctcttcctcctcctcctcttcctccccctccttcttgtcctcctccttcttgtcctcctcctccttcttctcctcctcctttctcctcccccacctcctcctcctccttctcctcctcctccttctcctcctccttctcctcctccttctcctcctcctttcccctcctcctcttcctccttctcttcctcctccttctcttcctcctcctcctcttcctcctcctccttctcctcctcttcctccttttcctcatcctcctccttctcctcctccttcacctcctcctactcttcctcctcctccttctcctcctcttcctcctcctcctccttcttctcctcctcctccttctcctccttctccccctcgtccttaacctcctcctccttatcctcctctttctcctccttcttctcctccgcctccttctcctcctcctccttatcctcctctttctcctcctccttctcctctgccttctccttctccttctcctccttatcctcctcctcatcctcctcctccttaccctcctctttctcctcctcctccttatcctcctccttatcctcctcttctttctctgcctcctcctcctactcctcctcctcctccttctcctcctcttcctcctcctctccctcctccttctcctcctcttcctcctcctctccctcctcctttctcctcctcctccttctctccttctcctcctccttctctccttctcctcctccttctctccttctcctcctcctctttctcctcctcctccttctcctcctcctccttctcctcctccttctcttcctctttctcctactcctccttctcctcctcctcctcttctttctctgcctccttctcctcctcctccttctcctccttctcctcttcctcctcttcctcctcctctctctcctcctccttcttctccttcctcctcctcctctgcctcctcctccttctcctcctccttctgctgctcctcctccttctcctccttctcctactccttttcctcttcatcctcctcctccttctcctcctcctcctttctcctcctccttctcttcctctttctcctcctcctccttctcctcctcttcctcctccttctcctctttctcctcctcctccttctcttcctcctttctcctcctccttgtcttcctctttctcctcctcctcctccttctcctcctcttcctcctccttctcctcctctttctcctcctcctcctccttctcttcctcctcctcctcctctcctccttttcctcctcctccttcacctcctcctccttttcctcgtcctcctccttctcctcctccttctcctcctcctccttctccttttcctccccctcttctttctccacctcctccttctcctcctccttctcctcctccttctcctcctccttctcttcctttctcctcctcctccttctcctcctcctcttctttctctgcctccttctccccctcctcctcctcttcctcctcctcctctccctcctcctctccctcctcctcctctccctcctcctcctctccctcctcctccttctcctcctcctcctccttctcctcctctttctcttcctctttctcctcctccttctcttctttctctgcctccttctcctcctcctcctccttctcctcctcctcttcttcctcctcctcctctccctcctcctccttctcctcctcctccttctcctcttcctccttctcctcctcctccttctcctcctccttctccttcctcctcctcctcttcctcctcctcctcctccttctcctcctctttctcctcctcctccttctcctactccttctcctcttcatcctcctcctccttctcctcctcctttctcttcctcctccttctcttcctccttctcctcctcctccttctcctcctctttctcctccttctcctcctcctcctccttctcctcctcctcctctttctcctcctcctcctctccctcctcctccttctccttcctcctcctcttcctcctcctcctccttctcctcctcctccttctgctgctcctcctcctccttctcctcctcctcctcctcctgctgctcctcctcctctttctcctcctcctccttctcctactccttctcctcttcatcctcctcctccttctcctcatcctttctcctcctccttctcttcctcctccttctcttcctccttctcctcctccttctcctcttcctcctccttctcctcctctttctcctcctcctcctccttctcctcctcctccttctcctcctcctcttcctcttcctcctcctctccctcctccttctcctccttttcctcttcctcctcctcttcctcctccttctcctcctccttctcctcctccttctcctcctccttctcctcctcctccttctgctgctcctcctcctcctctcctcttcctcctcctccttctgctgctcctcctcctccttctcctcctccttctcctccttttcctcgtcctcctcctcctccttttcctccccattctttctcctcctcctccttctcctcctcctccttctcctcctccttctcctcctccttctcctcctccttctcctccttttcctccccctctttctcctcctccttctcctcctcctccttctcttcctcctcctcctcctccttctcctcctcctcttctttctcctcctccttctcctcctcctccttctcctcctccttctcctcttcctcctgcccctcctctccctcctcttctcctcctccttctcctttctcctcctcctcctcttcctcctcctccttctgcttctcctcctcctctccttttcctcctcctcctccttctgctgctcctcctcctctccttttcctcctccttctccttctgctgctcctcctccttctcctctttctcctcctcctccttctcctcctcctcctcctccccctcttcttgctcctccccctccttctccaggagcccttcttcatgtcctgcttttcataactggatgggtgcccgtcttcctattcccagagcaccctcttcatgccccagtctcactctctgacacattgcatgtaaattctctattcccacgtatgttgtggccacactaagctgtgaactccctgctgacagaagtaggtctttcatctccacacaaattctcacatagtgcctagcacacagtaggcactcaataaatattgcttgaattgactgattgcttgatcaattgattaaatatttcataacatcatatcaacctctcttactaaaatatgcaaatatatgtgcatggcgcttggtgaaatgtaggcatcgaggaatcttacgaatccttttctttttctgcagtccccaattgaacctactactaccaggatggagatccccccggggacccaggcctctggactcctgcactgaccatcccctgccactgtctcctgccatccctgctgcattctcctttccgacctgccatccctgctgcattctcctttccgacctgccatccctgctgcattctcctttccgaccctctgcatgtggtttttatcccttacacctcctcaccagatcagcaaacacacgggagccggcaaggtgtgatgtgaggcctaagctcagttttcattctctttgtcttgattttctttcaccttgtgtgtaaatagactctttcttctgatgctcacccaaccctttaatatgcaaggccacattcatcctcacctcctgggctgcagacgcgaaacagcaagggcttattcctggctttaaagaggagaaactgaggcctagcccagagaggggacttgctgaaagacattcagtatacctaggattagaagctcggtctctgtattccctggccagtatataatacctcttcaattgctctgaaaatgaaaacctcaggattattttgcaggaggaaacaaaaataggcctggaaaaaccacagccacatttctgacaagctccattcagagggcaccataacttacataaatgatttcctattacaccgcaattgtcactgcaacacgacagtcttgcagcttccttgaagtgttctctttgttgttttttgtaaagatcctccagaaagaagaatcaaatatggtccaagcagggaaacaaagcacatgacatccgcagacccagattccccttccgcatgattctttctgaggaccaaagagaatgccatgaatagtcccccgtgggcctgagccctctcccacctgtcttcctcccaaagctctgctatatccttgcaaataggattcctttttttgaaaaaagaaaaaaaaatgaaagccaatggtttatgaagaagaaatgaagtggcaatttcccagcatggctgggaatcaatacaagctgttgtcagggttttcctttcaaagggtggctgccacacttctccaaagtcaagagcgacagagctccagtgcttgacttacaactgcttcatcatagcaagatatttttaatttaaaactcactgcagttgggttcgaactcagctgggacttgatttactgctaattcatttctctgattcctataattctaagctcagtcaccaaacagtttaatgctgatagaatcaccagtgcaatgctttatgaatgggcgtcaggggaattttgttagtgtgtgttagcaactgttattcactctggaaaggagcaccgtgcctgcaccaagcatgggggggctctataattgggcacgtgaattaccagtatccccaagtgattcaaacccaaataccactgagagggtacccccttttaccccaacccacatacacactcccacactctccctctctctctcacacacacacacatacaatcattacctatgtgagatgaatgccaggcagtgaaaacgctttccatgggaaatgcctaacttcactctccaggtcactacccagtggtggaaaccatggatttacagtctaattagaaatcctcagccttttcttggatggcaaagttttctcttcccaagagaaaatttgtttcaaccgtccaaagtttagggagatgtgtcttaataactcaagcttcctttgttaatttgataaagaacatttatctttgtcagttatattgaagcctcttattcaagcagttggagaaaaaaaaattgagaaggtgaatgtcattactcacatattttgcaaacatccatcttgatctgttatgtgcaaccaaaaagtgccacttgtgggaaacatgtccacaaacctgtcagagtggcattcacactttttgaatttgtttctttatgaaatatacacctgaaggcagatcacaaggccactgtcgctaaagttttgtgagaattcgcagtcatttctgggagtctcaaaagcaaatgacaaggacaagaggcaggcggtgcctctgaaagttggggtcacaagtccctacaagtccctattttatcagtacagtgaattcattcttctggttttttcacctctgaagtaaaccaaaacttgaaagcttccagttgaaggtcaccatctcccaaaatgcctttctatggaaccgtctttccaggagacatcaataggcttaaatactcccacacaaacggatccccatggcccaataacctgaaaagcagtgggcaaagaataaataggtttcccaacaacaggtcttcttcacctttaattcgcccttatgcatctcctgaagaggacaaaagagaggatgcttgcaaaacttacttggtcacagaatgctctttccatggaggattttatagactagtctttggaatgttctgctaaattcagcttggtctcccccccaccccccgccgcaatctatcagtgccaaaacccatagtgagttttacacagagagaaataatttaattccatgtgcatccatgtgcaagaccactgcacctacctgtccccaaccactatgacccaggatgctggagggtaactgaggggctcagcctgtacccatctggattcatctgaatcctctggaatagccagtcagtctgacttgatgtgatccctactctgtccctgctgcagagtaagaacccaccatattagtctggttcaccctagccttgatatttttaaggtcattcttctccaccttatcctactccatttattccttctatttttacagcaaatatttatcaattgcttccagtaagataggctctgggttgggcaatgagtatacaagaagtaagaaatgatccctctcaacctaaaacataaagaaatacatgattcccactgttttcattgccactgccagtagcagcttcttcaccattattaaaaagcatgaattgagttactgatgaaacaaaaaactgcttgaagcaggggctgaccctaccttctgggagctgcaactctcaggcagaaaccctaatgcaggcccacgtctctaggtcagtgatttgctcacatcaatcagtggttaggggcaagtgcatttagggaggaagatagggtcagtatctaatggacaagagagcagggaaagaggtcacaagcacagcatgaccattagtcctctccccagcctgaccctaaagggccttcaaagcacaagagtagtaaaaaacgttgatgaggggcaggactagctagaagcaatgacttacaggaaatattttatgcagaaatgtcccctgttgcattatatttcagtgctttcattatttcttaaaactgggagggtggcagaggtcattacgacctccccctgcttcccagcagccgtgccatccctgaaatagtcacacaccactatgcggaaggctggctgttgcttagtaagccccaaaacattagaaaagtcttcagaaatcggattggcacccattcttaatgtggtttctatttggggtttaaatgggataatagtgtagtcgactagtgttgacacagactcgtgaattctggggctcctaattggagtaccctgccctgtcttgccatctgactctgttctgaagaactttatgttctttgcatggaaaccattatcccagactcccaatttatgtatctgcccaaatctgctgagtcccacctgacatcacgccaccccaccccaattctgaactgcagccattttcctgttgaatccttgttatcattgccactgccaggagcagcttcttcaccattattaaaaagcaggaattgagctcttgattaaacaagacactgctggaagcagaggctgaccctaccctctaggagccgcaactctcaggcagatgccctaccgcagacccacgtctctaagtcagtgagttgctcacatcaatcagtggttaggggcaagcatatgtatttagggaggaaaacagagtcagtatctaatggacaagaggcccccagtgacgctttctgctgttcctctggccctaaagttcttgctgtcttttcttccttcagagtcaaaggctgggctcctgcaggggtaaccctgacataccttctgcagggagagccaaggaagccccagccccagggcctgacccacagaggctctagcttgacctggtattcccaaccccaaagtgaggggagttgactcatgcctcgtggggtgacttgtgaccagtgagctacagcagaccagaaggacctgtggattaactgctggctgtgcctcaccaccacagactattctgagacatactgttcacaccaggcttccctggatacctcctgagtgactgagccaccagctgcttttcactgggaaggcagggccagcttggtaatacactatttgttctccttccttccctacctctcctcctttgcttcatttttgcttccccgggatctcacccctcaataaagtcataacacatagcttcttccttgagctctactttctagggaacccaggctgtgactggagtgaaggacagacaggcaggggcacaaggcccaggccctccatagttttgacaagaatagtcctgcttgcatctgttctgtgcactggaattccatataaaatttcactggagcaaagattttcactgtatacatgttaaaatatgtttaatcaccgatctagactaacctcctcattttataaacaataaactgaaacataaaatgatttttcccaaaatgctttagttagagttatctacatctatttgtatccaaagcctagctttttccacaacagtggtttttaagcaaggggacatattggaatcatctaggaacctaagaaaatggacacgtgcctaagtagctgtctctttccttggaaagacaagggacaggataggctctgaagaaggctgagcaaatgctgaggccagaggtggactctgtacctatctggcacaattctgcttgagaatctattgctcacacaatcaccagaatccagtacttggtttacgtaatgcaaaggttcagtggaaattttcactgtagaagccacccctttattcacatttgacagtagtcatagcaaagtgcttgtcttagtccagtgtttctcagtggattccaggtccactacacagtttatatacttttgtgatttcacaatccatgtgagtgtattaaaggctctgagaagtcctgcagcaaggagtatctttagctttgctttacacccagggttttgcaaacttacttgactgcggaaacttttttgcatgtaatgcctattgactcccccgcagaatatactttgggaaactctagtctattttaagtattactttcaggaaagcaggcctgagatggagaggaagaaaacgaactccaactgactctagcaacattagctgacattccaggcaggctgcttcagttgcacatcctgacgtctgctactgtctcctctctcactctctaaccccgccacaagaacggaagcaatccaccagctatgccttgcttacttctttcctcttggcctctgggtcaaagccaaggaatgattggttcaccttctagtttgagcctccacactaccaaaagggaaatccagctgtgctcattcgagaagagttcagtgagtatgtcagataaggaactgatcttgagcgaagaccaggaaagcctttcaactgccatggttttcctgtcctaaatttccagcgacctcttcctccactgcttctctcctcatacttcataatgaaaatactctaccctgtaagacctcgggaattgattcagcgaggctgtgttcagcgcattgactgcggagactatcctcttagctagtgatctgttttgtgttggagtgacaaaacatcccaaaatccaatttgctgttgcgaatcctggttcatggaggaaacaccatagagggggaggggaagatccaagcttagaaggaaaagagaggatgcctgagatctctccaacacctgttggtttcagtttgcacaggactttacctcccaatgttttatccactcattcctactgctgcctcagaggggaggtgatgaaattccacgtgcaccccttctagccacctcaagttggacagaacttttactcacctcacagtgtagagaagtcaaagaaataatgcatggaataaaagtttgtcttttggagaaaaagaaaaaaaaaaaggcaagtaaccaaagtgcctcacttgtggctttttcctaaaatgttcagaccagagggactgaggttagccctggctttggagtgggacagaacccaaccaggcccatgggctccttcagggattcacacccacacctttttgcatcaggatgtaattcctaatgccttgccttagcctgcaccatctcaggtctgaattattttcttcatgcaaatggggacctatcaaaattcctctaagtgctacaggatggctatcccctgacatggtccgttggcaccaacatgcgatgagtctctgctgcaaccaccataggatccaggcacccagcaccgcatgatgtccctaggcactgatttcttccctgcttctggatcctgaagtcagaaactctaggagtaataaatgaatgaatgaacaagtgtcaagtacctaccgtgagtggtgtaatggtaagaatctttgcccaagagtgaaaaaaccatccatcccttagcaacctggcgccttggacatctcacctaaactctcttctcagccttagcttctatgctatcaaaatgggaataaacaatacctaccttgcacagctattttaaagatgaaatgaggaagtgttgtttccacaatactagcaatttgaagcagtcaccagggagaattagactcctatcagaattggagcctcatagagtctaaagtaaagatgggaacttcactcattcattcatttactcattttttcctgggagaaaatgggaattgccaaatgaggtgacagtcaccctcaggacctgagcattctgctagaatgatccatgcaattttataacctaccaacagccaaggagaagactcatcccccttgatgaatggggaaatcgaggctcagtgaataaatacatttgcctggcatcacagaggtagtgcaagagactagggaccagatattctaaacttcctcccaagcactcacccataaacctcccaagggggcagcagtacagtgagcacatatattctaaggaggaaaccagcacagtgatgaggagaaaggtcagattgctcacaagtgagacttggctccatcactaagtggctgtgtgatctgggacaaagtctttaacctcctgcatctcagtttcctcctggaggaaatagggaccgtaatagcctatctgggttgttatgaggcaaactacttaaatggtatctaaaccaaatgagtgctcaataaatattggccaccatcatcattaattatcatcttccattccattgtttttacaagaactgaagccagtactaacatcctcacagcctcttcctttgggaggctgatgccacaggaccggacaagtgtgtgggggcatacacagactcacatagggactcaggaaactcttcttccaggctgctccatgccatgcagggaagcagcctcctccttcaggaacaaggcctgggctcttgttccaggggaatcaggacccctgcctgcctttcgttttaaaatccatctcttaccactcagcagcagagcccccttcagtctccctgtgggctccaccttcctaccgcaacttgaatggtacagcctgggcagtgaggacaacatgaaagaagaaagaaaaagtctgtgcagctagaggggatcaggtgggagtctggggagggagcagtggagcttgcagcttttaaagagacagtgtcctgtccacagggccctgtgtggaccaagcatagctcgatagagcctataggccaattaccctaatcatgtgcatctcccaaacagccatttattagtgagacgtctttttaaaatgccgcttttaaatataaataacacttaatcatccagctgtcgttaaattcatgttatattgatttcttggagtgccgcaaatttgagggcgaatgggctggcggatgtgcgcacaaagccaagaggtagattagcaagtggtgggggcagagaagtgggggttggaggaaaaggaagggaggtgtcaagggagggaaatgaacctactcaatagcccagggtctgagccagtttcacattgggtagcactggacacaaataagaagagaggagacgctggcacatctgttgcatagtctaatgagagccaagatcatggtcgtgttttctgtattgctgccgcccccttgtaacccaccacagagccgctccaacaggtctctgatgtgcattgtctgcgtatgccttctctaggtgaggatggggagaagcagctaagaaatgccccctagctggctaggaggagagagatccacagcgatttctctgcatcaaagcctgatgataactatgaatcaagagtggttaatgacccagcccctttagctctctcccacttcgggactgctgccatcctagaaagcccccacttcattcccagcagccctcattgtgatgaaaaggatcccgaggccaagtgtatgtaggcagactctgccgtgcagatttccctgtctgcagggagtagcagcagcaggcgacaggaaggcacagagaaggagaaaggaaacaagttgactgccttggagtcctccagaaatgtctgcagtgtcccagtgggcatccaggaggaagtcctgggaggacagatgagagcccggggaggcgtgattgggtaagaaggagcagcttgtaggtgacccatgcctagtgctcacaggagagctgccttaagcaccgtctaccaggcagcgagggtctgctgaaaagaagcattcatggctggggtttttctagtgtgactcccttcccagtgagaaagacctcagagaacttaaaaggaagggcacagaagagtggcagagagggtgaatgacagcgtggcatgctccagggctgggcaagagagccaggaaaacgtaatgtatactccgctttacagagatgttaattaatgcctgccttgtcctagaaaccaaattggtacctaatgctaagtgcagaaagtgcagagattttctgaacccagatgtttagcttataaccagcataatgatactagctttgcattaaaatgatggatcctgaggctgcgaatacatgagaaaggaaagagggtagggaggaaagcagagaaaggagtggaggtctacagggaagacacagacatttcaggaagatcctgtaccctatccctttgcctcttccaggtcccatgagggactgtttacctgggaggcacccactgttgctggagctcattatttcttttgcaaaccatgtgctgctgtacgcgtaggtgggatctgcctgtccacgccctcaaggggcatgtggggagaaatgttccatttcttccacagcccggaagacagaggtggaccccattgtcacacatggcgggggcggggagctgaccacatttagccagactctgagaacgcatgtgtgtatatatattgggtgtgtgtgtgcacacgcccaccattcttaaaaagcaaataaggtttcttccccctactggggtctctccattgtgagagatttgctttattccatctatgcttttcaatcaatcaaagggcagctcacacagcacacagcgggaatacaatctccctcccggggtgtctgcgcttctccccagcctagccagagacctttgcaggagctgaaaaaagtttggaaatagcggagtcagggtgctgaaaaagccctttcattcagcccctatcttcaggatttacaaaaacaacccaaattctgagcctagcactgaggcctccttgttcaaaagaatgtttgctcctcttccatcatgttctgtaaggctcctaacatattttttccactggtgggtctgtgggatactctgaacacatgatcttggacagagggtacaagcttattcagttttgtgggaaaatgatatgatcatgttgcctagaaagctacctcaaagtgacagcaccagaaacacaggagcttgtacatatatattcaattccgaatttgatttggatctcatgttcttctccctatgacaactgagaccctaaattagttgctcttagaccccaagaagggaactatggaaaagcctcttagaaccccagccacttcctacctcctccagaaaaagttaaaatgagcagcctgtgaaattccagccagagagaacaagaatgaaaatgctttcgggaaataggaccttaaagcacgggcgtctggggagtgattctacaatcggagcaggcttgggctctgggggacgctggcagacccacgaatgccttgccttctccggtgggcagtgccgccacggtcgtgagggaggggagcctcctcttttggaggactatatccctcgtgcttcccccttctagttctctttctcagacacacaccacgaaaggcatgtgacaggtgttcgccagccggaggcaccggggaaggcagccccatgtgcccagggagggtagggaggtgagaggggacccaagtcctgtgtctccaagtcctgtctgcttgctgctaagcaggcactgaggctgtgaataaggtcttaccttttaaggaggatctgacccccgtaccttccctagacaagcaacatacgcggcgatgctttaagccgctttctgcctgaaatctcggcgcattcccggggaagcagtgccacgcttcagaaaggcgtttgtgctgcctcttactggggaaacgcagtgtctgtttcatatgcgccgccctacagaactgcagccccaaccgcctatctggcctcctccccgggcgctgggccaccactctctccaaatatgcgtccgaatatctgtgggtctgtctcccgttgaaatcccagggtgtccaaaggccacggggccgcgatgacactgggtaggtctccggaaacctctcaggacttctcccattttaaagcccagctagggacgaaaggggctgggagctgaaaaattgctccctcaacctccccgggtgggaggcagagccgggaatacacagaatcccaccccgaaagtcccgggaaagagaagtctgagtccaggagcgtgagaggagaacacacccgggaaatccctgctccggccgctgcacctccgcgggcgtccaggtgggacgtgggcaggtgcgcgagcgccgtgtgtgccggtgtggatctgtgtgtgtgcctgcgtgtgtgcgtgtgcgtgtgccgcgggctggctccgggacactgaggactcccgggtcggcccaggtctgtccgaccttgctgccctcgccgcccgcccggccccactccccggcgggccggctccttacctggacgcgccgcgtttccctccttcagcgggagcgccgcattgacactgcagatggagcctatgccgctgcctctcgccctcctctgaacgtgtgcgtgtgcgcgcgtgtggctgcctcctccagccccagccccgaacgcaaatactccaccgaggcacagggaagccgggagcagccgaggaacgcggagggcgccgaatcagagcctgcggggcttgacagcttctcttgcggcgtccaaggtgggcgtaatgtccaacaaaaaggtcggaaaatggggatcgattccgaacacccctttcctccacccagccccggagcccgagcagcggcggcggctctcgggggctgcggtggcgacgccgggctgccccccttcgtccccacccccgcgggctgaatgtccttgatgccaagcgggcacagcggcgtcactccgcgccgcccatgctcgcccggtcgggccgctgcccgggcgcggcgagtgcgcgggggacccgccggggagcgctctcggcgcctctgcgcgcctctctgggtagcggcggccgccccccggcagcccgcggccggccgcgccgcggcagcccccacccttgccgagacactcgccgggcagtgccctggggccggggctggggggccgcgggagccgccggctgctccccggggaggcgcggggctgcggcggtggtggctgcggcggctggcgctgcggcggcggagagctcggccgcgggccgagccgggcctcccgggcgcgcccccggccccccgggcgggctgctcgcaaagtttgcagggggcagggagcggggccgccgctggctcggccgccgccggagctcccgggctgcctgctgccgccgcggctcgctgctgctgtgcattgaagcccggccaagcgctgcaaaaactccagctgcctggcgctctctgggtcctcctctcctccctcccgccctccctgcttcccttcctccctccctcgcctcgcctcctctcctccctgccgcccgccgcccgccgccgctccctctctggctcgctctcgctggctcggagctcgcggctgacatctagagcgagggagagcggccggcagagggggcagggggcgcctccctacatgctcccacccgccgccgcccggcttgccggctctcctccgcaccaacgtttgccgacacccccctgggtcccctcggcccgcacggagctaccctggcggtggcgatgtggggcggagagaggggcatacatgggtgaccggagcgcacggcgcgcgctcagagggaggcgctcagccgcctcggaatttgcagctctgggcgctggccgtcggagggaccctcaggtgctcagagctgacacaagcgcacactgactctgaggcatacacccattgctagtcagaacccctcccaacaccccaccaagtcacccccacatggcacccaaggaggccgaggacactgagggcacaaggcccgcacgagagaacatgagtggccagtgccccagagctggcttggtaacctgacttttccattcatgtttatactgagcggctctcctggctcctctcttctctgaaaccctagatcctagactacatccagaacagaccatgccaacatcagggtggtttctgaagcccaaagaaagaaatcaccatgtagctctggtttaggcagtgaagatggggagtgggtggcactacctcccaaacctctgcctagatccccctaggaatgggcccacccaccaagagaaaccgaagggattcccacacctgttaactcaactctgtgcatgccaccctcatcctcatacccgctcccaccatagtctgagggaagtggcaccttcagcagagtccagtaagcattccctgggataggcaaccagcaaggacgaccctctaaaggagcccatggctcttggcctcctctctcctgtcccttctttagttttcactgtcctcacacccagaaactcccgcccattactgtccctcccatcgaaacatctcagagcctccttattaggtggacatgactgataatggcttaaatgcctatacctccctataggggttatattctcacagaaatcgaagttgtgtgaattggggagcctttgaaaggagctgtgagatgacagcttaaacaagccccaaggtgagcggcacatataggtcaggcttggcccacccagagaggaccctgctgaaactttgctctcaccaatgagaagatgaaccaagccagaatgaggaggaaaccacatgtttgattctttggttaaaggatattccaggagacagcgtggagcccttttagtctctggttctctgctgagtcttgcatggcccagaaagcagcaaggagttatcttattaagcttacatgaatacattgatctgactccactcttcccagaaaccctgaatcccagactctagataaagcacacaatatcaggttagtttcagaagtccagagacacacataacaaaatcactcaatgctactgcctcttgaacatccttccagggtggaggaagcccagggccaaatgcctctctctgcaagactgggattagcacaaggccagccgggcactgaggatacaaaatccaaggaggccctgtcaccccaaggtccatgtaaggtttgcatcacctgatcctgacactgcttctaggtgtcccttttaaaattgctgcatgggtccatcacggcccatttccagaagtgacagcccggatagccccatgaaagtccctaatgggttacttaaggaatatcgttcaattaaaggcgcgggggagactcctttcaaacttctgttggccactcagctttcagggtatgtcataaaatgctgaaaggaaggggggaaggtgagaaaacaactctgtctcaattctcagtcattctagcatgtatttttaatacaatctgattgtctttttcctcctcatatcggttgtatttgtgtgtgtgtgcgtgtgtgtgtgtgtgtgcgtgtgtgtgtgaatatggcttgagttccaggcccatttcctgatggatggacgggaagtcaaagacctttttttttttttttttccagaggtggcaaataaaatgtgtttattattctttatctcctgcctagtgtgtggtgtcatttattttcattcaaagaaatgaatgccatgtggtgcctgaagagtaataacagagccaaatgacagggaagacacacagcaaaaagctggaccagccacgggcaggtgaggggcccagcgagctctcccgttgttaatggggccaggggccatatctcaaattgcctttccccggttgccttccactgaataacacggtaaaaggcataccaaagggggcagttatcatattatcggaaggaggagtagaaagggtcaaattagctgcagtagaggatttttttttttcagtgatgacccattggattgactcccttaagttaggagaatggaatggggtgggatgagtagggcctctacattggaagttagaaaacacatgtcctactcctggctctgtcattggccagctttacaatttggagcgggtcacgtcctctcaatgatacctcatctctcacctgacacattcgccccttagagttgcaatgacattcaaaggacataccatcttattaatgtgctttgaaactctaaggtaggtacaaaacacatgtagggaattagagtcgctttccagatgaatgtatctttttatttttttcaaatagaatgatacaatgagggtaggccttctgctatcttgtccccaccccaagaataaatacacaggcaaaagcagcatcttaccacagttcaaaatgtgtttctgcattaggtacaagatcttctggctctcacacctcctctaccccctctcccttggtgagggctaagggagacacaagtaggaccatctaggtgtcccctactgacaatggctctgtgagtcactccctctacctcttgcctggtcgtgaaactggttatgtcattgtctggacccatggccacaagagggagaagctaaatggcacattgcttcagagagtcctgttttctaaagaagctatgtctgtgggacttgggttggggtttattgctgggtttagacagaaaaagtattggttcatctcccacagctgaataaaaggaccagtttaataggaaagaggagaagaaactcttaagtttcccctcacttagctaccaccattttattagcctaggaacagtgctgctatttaagttgataaaagccagatttgctcgttaaataaatcaccagagcctggtggtgctagagagacattttctttcccccaagagctgcccccatggctgggtcttgtaccttgcactggatagaaaaaccacaggcaggcagtcagcagcttaaaaacctaaattgtggcgccacctgcaggacagcaggaatatcatcagtatcccacagctcagcagaggaggcaagaggagccttccgcagtgacacaggtgaggccagggtgccctctggcccctgctttctgcatgtgtcaccacatgtccacagcacactccagcagcctttaatctgcatcctccttgaatgctgccatttcgagggatgggcagcagctctcaagattctcagtccattcaaactaacttattcttccatctgtctcctaagggactaagtggacctctaagccaagggttctgtcttcaagactggaccatggaacagtaaaacagaaaggagaagtgactgcctttcaaggaagatgaggggaggaacatccttgtgtcaccacagggcctactagtaagttgaacttggtggctgggtattctcagtagacccaactgttccaggcttccctagcatgtgggtgcaaatcagcacagagatattaacatccgaatttcaactcccagccttttctgctcagataaaactttggccaccactgaaaaacccctccctgtctcctcccattatgtcagagaccgccactggtgggtgtgcttaggaacaagtctgaccatttcattcaccacaagtaccctcttggaaatccactgcccatgagccatttgatggaaggacatctctgcattgccagctctgtggttgccctctgcaagggcacctccacccggctgcactgctggacatggcaagctctgctgccgtgccatggctttccaagccacaccggggggttggtgtttaggtggggaggacacccctctcctcctacacacacacacacacactgtggatcttgatcctctgggcaccaaaataactcccatgcctcccatggtccaagtcttactccccttcctccccagaccctttcatccactgccccctctccagaatgcttccttctctttcaactaacaaaaacaacaaacaaacaaacaaacaaaacttgtctttttaaccgcagaaaccagaagttagaggatattgtgaggtaaggggagatggagggagggagggggtgtgacttaactccattggccagaaagaagagagtcccagatctggccagagccatgtcttgctacaacaagaaaggagaaatacctcagtgtaacccttcttggggttaagtcctgggaggcacaaggtcccgtagtatgcctgcattacaaggactggatacaattcacgtctcccacatggcacctctctcttggcactgcctagtacactggctaagtagtttaaatgagtcacttggcccctctgactggggtgcacataacagaaaaggcctcaagttgttttccttgtgatgaagatggattcgtgctgatgggttgaatgctcttgcctggtaacacatttacaagatggttgccaggtggtctgagtgtaagctgttctaagtgactgtggttgccagcctccaaaatggccccagtgactctcaaccagaggtattcatgccctcatacagtctgctcccatgctgaatcagagctgacttaagtgaccatgaagtgacagtgtccaaggctaggtcaaaaaaagacattttagctcccagcttggtctctttagtcccttggacctgccatgtgttgagaaactgagctacccaccaacaaccagtgccagcttgccagccccatgagtgagccaccctaggagcccatcctccagccccagttaagccttcagatgatttcagccttcagaagtttccaactgaggtcccagacatcatggagcagagataagatatggttttatgccagagatttgttatgcagtagcagataataaacacagtgatttgcagggaagatatcattcctctgaccttgacctcattaacctcttaagcttattatttgagcccacttggctgtagaataagaaggacaaagtggggcatgcttgatgcatgatagtctcatactgggcaggactgggcaccaatagatgtcctgccagtcactcccttcagagctccggggttaaacctcttagtacatctcagtgtgttacacagaaatgagaaaacccaatgaagaggcttgaaagcatccacaaacagaatactgaaatccagcactcacttaagatgggccatcgtcagttcagttccagagtattggccatcagagacattcaagagagaggcagaaagttgtgccgagtcctgttcactttcacgagctgtctggcacctgcctctgccagagagccttttggaggtgaggttgaatggggctccagggtgagtccttgcacccaccaagcaccaggcccagtggtgctgaaagtgttccctacatctgatcctaacccgtgctacaccacagggcaggagggaggcccaaggatgcttcctatagatggcaggtagagtaaaaagagactagaagcgagatgtgattgaaagctgatcgtccactttccctccacaccattctccttgaggacttctcgcatcaccttctctcctgtgccctcagcagcttccagagagctcagtggagcctgcaagctatcagcagggccaaggcatatacaaggattaggacgagagaagaagggaagaaagaggcaaagaagaagaatgaagggacaggagtgcctatgcaaagcagagaaagagccgcagacagttgccttagggattctgaggacagtgcttaggcccaaggtgacctctctccactttagtgtctgcctccaggactctgtggcctggctccattctccttctggccctattttcctggccaggccctatattcttcctctgtttttaaagggctttctcctaacgcacgcctgctgactgtaaccttcacaaatgtgagatgtcccttgtggagtccagagagagcagggaccctcgaagcctgaagtccacagaggtgtgtggtagcacatgagggttggggagggccaatcgtgccatatcttcccaactctgcaaccagcgatgccaggccagctgctggaaatcagccactgtggatgtatttgcactatgggaataggcacatgctacaaattgggacttttgattttgtggagagctggttgttaaacacctgccagcacacttctggcagggtcattgatgggcctggataagacaggtcagcccaggcctgcccagttctcaaatgattctgcatgggaacccatcagatacatgaactgcatcagcccagttcagggtcagagtaggagtttctttctgtccataccccaccttttaattaaaagaaaatattaatatggactctttctattaactgttctttccaagtcctgtaggtaaggagcctttactcgtggtttttgacactaaaatcaaattgttattctttcctgctaggtaaactgagccaagagatgctgacgtgacccatgggtgtgtaggaagcttgaagtgtacatctggtaacacctgtcatttactccctccacctcaaacttaagattagtgcactgggtttggcagaaattctattttcatttcctcaaagcactgcactaaaattaccatacatccataccacagaacatggtgcagatgtaaaacaaaatgaaaacaaaatgaagtaaatctatgtatgctgctctgaaaaacaacagcaaaatgcagaacagtgtattcgtgtatatctttgcatattttgaatatacaaaataggcttgtacatacataggacattttggaaggatacacaaaaaacttaacagcagaaacctgagtgagaaacagagcgatatgtattttcttaatttattgtatattcttttttctttttgacgttttaccacgtgcaagtactacgttctccatttttcaaaaagctagttgaaaatgaacaaaaaaaactgctgctaaaaacatctttgtcacaccgccagtcctctgctcactctctcttctcaaatccagccaaccactcctccaccccatctgtatcatattcgagcttgcctttgttctagtttcctactagatgcaccctgttgctcctcttttgtgggctgccgtgaaggtcacgcagcagcctgtctgcctaggcagacagctcggtggatctggtaaacgtcccagagaatgagacttcatctctcatttcctaaagaccagccagtatcctacttggccagagaacttctgtttggcactagattgattatagggatattccagggatgctccagcacctcctttctatgctaaagcaagcagctttagatcaagtcaaaggaaatatccttctacattggagtcagtaaactcatggaaactaacactcagacatggtacaggccaaaaataggatgatgccaggaaacatttagatagcaacaggtgaaagctccatagtgttattaatgttatcaggaactgtgtagggagagacaaagaaaagccagagacaggcaaatggcattccagttttgcaaaaggggaaaataatgtgagttctgaaaaacacaaacaaatgagcctggcccccaaagtgaccattggatcactaaaagatagatgtggtaattatttagaaaaggatgtgattgatcactaggagtaagtctggaatcactgtcttaatcatttggggctgctgttatgaaatgccactctctgggtggctttaacaacaaatatctatttcttatggttctggaggttggaagtctgagatgagggtgccagcatggtcaggtacttggtgatggctcctttcctgtttatgtcctcagatggctcttccttggttcattcaatcagacagagatctcaagtgactcttcctcttttttataaggactcgatccatcatgggtgggggctctaccctcatgacctcatctaaacctaattacctcccaaaggccccaacttggggggttagtgcttcaacatacgaattgagagtgggatgacacatttagtccatagcaatcacgaagaacaaacttggttaggctggtgttgctctctaactcaacaaggctgtgaggcttttatatcaaggaaacgtaagagagaatatctgaactgcatcaaggcatttaatagactctttaataaaatccttgtagaacaccaggcaatgtaggctggtgaattaattgactcaatggttaaaccccaaagatgttcattaatgcatcaaagacaacatgaaggacggttttcttagggtatatgtcagagctctgttctcagactaatcctattcaacacatttactaatgacttggataaagatagaggagacatggtcatcagatttgtctatgattgcaataaaagaaacatattaaatgtaagtatttgcaatcctgctccatcctaaagaaaaagaaacttttgctgaatgttgggcattttgggtgttgacgggcattttggtgttgtcttgaggtatcattctaaggaataaaaaaggtgagagagcttaacagatctgcatttgaaaatatatggcactcaggccgggcatggtggctcacgcctatgatcccagaactgtgggaggccgaggcaggcagatttcttgagctcaggagttcaagaccagcctgggcaacatgatgaagccccttctgtactaaaaatacaaaacaattagccgggcatcgtggtgggcacctgtagtcccagctactcaagaggctgaggcaggagaatcacttgaacctgggaggcggaggttgcagtgagccgagatggtgccactgcactccaacctgggtgatagagtgagactccatctctaacaaacaaataaaaaaaattaattagctgggtgtggtggcatgtgcctgtagtcctagctactcaggaggctgaggtgggaggattgtttgagcccaggcaggaggtcaaggctgcagtgagccatgattgcaccacagcactccatcctgggtgacagagtgagaccttgtctcaaaccaaaaacaaagtatgagctgaagttgacaataagctcaatatgaatcaatagtgaaatactgccaaagtcaatgggatcgtaagctgtattaaaagagaatggagtcccaaaggaagcagtcccgctcaactttgagataggcagactatacgtgcattattgtgtagagctcaaggccccacactttcagcactttatgataagtttgagcacattcaggagagagtggccgagcccagaagggaattaattggaaacaatcaaagtaactggtgatgttcagctttgagaagtaaggctcaagggaacataacagcttcaaatatttgaagggctgtcaaagagaagagctgctgcattccttctgtgtaacttcaagatgtgaaagtaggatcagagaatggaacttatcttatttagacatattttggcttgatgtgaggaatgtctttctaatagagttctctaaagaaaaaataaattgtcttgagtggtagtgagttctccatcacttcgtgtggtcaggcagaaaccaggggacactcaagtgaagactagagtttggattgaatgactctgatgtctctagaggtttgagacgtttgttgttctgtatttatcattgtatgccctatggtgccataagctttgcattgactcagtagatatttattaggtggaaccggaatgctttgggggtaattcctagggaagagaaccaatatcccacccaagaccattactaaggagggaagtcaaggatgaagccagaaacataaggccaagggtgggacgaagggaagaggcaggtacagaactcaattaaaccctgcctctccccactctgcactgtacacctcattcatcagatgcaccatcttctgcttggtgctggtccatatgaattcatcctccatgttccatttgtctactagatattcatataatccagggctctgaatttttatttatttttctctttggttttcaaatcttcttcccattccacactccccagagttcctggtctttcttcattctatgtccagactccttttgtctcccttttctctaggtggtctctccctttccttgggggaccctttccatttctctcttcctactcccttaaccctctgaaggcttcaacagttaataaggtcctgaaagctagaacagggatcttaatgtcccacagaggcctcaggcgatgaactcagtgtcaggtagtgtcatctcatcctatggactgtgaacctggaggctggacaggtttttgtcctatgcctaactacactgtggacattctgcaaactaaaaataattactgctttttcctcctctagtttgtcttaaatgacctgaacaatggcattcttatctctcccttgggagaaattattctgtcatcaatgcacctgtctgtgaaagaatgtgtgctgacttcttctgcaggagttccaaattttgtctaaatgtctctttgccattcccaattatgcttcctcctgtactgcaatcagtattatcaacactggcatcactttcttcgccagaaaataaaactaaagcacccatattttcctccctggtggctttatcaatatctttcaggcatgatcataatttccctccctaattcttcatgcatattcagacataaaaactacaggaagagagaacacaccttgaggaaggaaggaagggaagggaagggaagggaagggaagggaagggaagggaagggaggagggagggagggagggaggggagaggaagaaaaaaggaaaagaaaaaaagaaaaagaaagaaagagagaaagagagaaaaagaaagaaagagaaagagagaaaaagaaagaagaaagaaagaaagaaaaagaaagaaagaggaaggagggaaggaaggaaggaaacaagaaaggagggagaaagggaagaaaagggggaaagaggtagggaagggagagagaaagaaatagagagaggagtgatgatgacaataataaaggtatcttcaaaaaaccaaaagagatagtacagattttcatgggactataaagattttttattttagaaaacttcattgtaattgtagagcaaaatatgccaacaggatattttatgtaactcatatcatgtttagaatcatccattgaaaaaaacatttatggaatgcctaccatatgtcactatgctgcagatcaaagttgtttcagccatagtcactacccttagggggtttcaggtgagtaggggacaaaacggtaaacaaatagctgtagtagtctgttgttaatgccaagatataagtattctcccagtagtgtgggattgtgagggagagagtgtcgatttagaatgcaattcttcttgattctgatcataacactatattaaattataactatatatttttattaatattgtctctgctgttatgtttcaaaaataagactcagtaagaaataatgtttatatatgttcttctaagttaagattttaaattatagaaagttgatgatagcatattatttaactagcatgttgcacaggaagctctgattattctagcttttagtatccccatttataaacactcaaatatacccttgaggaagaaaaccaaggactcaggtgagtagacacctcatatctattcattctttcttttattcattttttataaaaatacactgtgagctcctagtttataccaagtactgctctaggtgctgcagataaagtggagatcaaagctcttgtgcaacatacattctggatgggggtgagatgtaatgagtgaaatgaactagcaatagaacttcttgcagtggtaattcacatgaagaaaactaaaacatggtgttgtgaagagtggagatacactgctaggaacaacttccttgaggtggtgacatctggactgggactggaaggaaaagaaggagccagcagacgagagaagatgaaacagaggagtggccagtgcaaaggctgtgaggtgggacgcagaagagagaaaatactcagttccaggtgggacacagaggagggaaaatacttggttccaaagaaccatgaaagggtcaatgtgggtagaactatgcaagggaaagaaatggaacatgcaaatacacacataacaattcaactgggaaagataacagaaaagagttaggaaaatctattgtagctctgaaaagacctctgggtcatctgacttcttatgctatatgaaccaagcctggttccataaaagtgaactaaggcacaggcacagaaggtaactgaggaaatgaactgaggaaggaaggtgccgattagaaatagagactaagtcagttaggaaggcctttgtctgaaagtaacaaaatgcctattgtattagtcagggttctccagcgggacagaactaattggatagatgtatatataaagaggagtttattaaggagtattgactcacacgatcacaaagtgaagtgccacaataggccatctgcaagttgaggagcaaggaagccaggctgagtcccaaaacctctgaagtagggaagccgacagtgcagcctccagtctgtggtgaaaggtctgagtccaaaagctgaagagcttggagtctgatgtttgagggcaggaagcatccagcacaggagaaagatgtaggccagaagactaagccagtctggtctttccacgttcttctgcctgctttatattctggctgtgctggcagctgattagctggtacccacgcagattgagggtgggttgtgcctctcctagtccaactgactcaaatgttaatcttctttggcaacaccctcacagacaaacccaggaacaatactttgtatcctttagtcctgtcaagttggcactcaatattaaccatcacactcatctagctgctcaagcagtaagacatttaatatctcaggagagcagtctggaggtaggtggctccgggcttggtgcagggactcagtgaagttatcaaggacccagtctctcttcctactttctttgcatctcctccccagtgctcccttctgacagcaagtgaaacttctcagagtgctcctgcatgtctgattggccagaattgggtcatgtggacactccaagctgcaagggaggctgggaaaaagagcatctggaaaggaggcatgggatcactaacactgatttggactaatcaagagtcaaggtgtcatcctctgcagatgcaatcaacatggagagccgtggaacaggggatggagggaagggtgggccacagaaacacagggcccatgttggggacaagagggaagaaaagcgaatgcactgtaattgattcagaagacacgggttactatcccagccctcatcaaatcactcaaacaatcttcaccatggttcttcatccatacgacggaagtgacaacacctatcttatctctcaagcaggctgtgaagagcacaaattgccagagtgaattatgagtgcctaatgtctgcccacgactccacaaggatgcagtacaaaagtattgtagcttctatttctatttatttttctcattcttttaaaatatatacagttgtgcatataatatacataatgcattacaacaatagactatatatatcttataaatacatacatgtgtatatgttggaaatgctcaaaaaatttactggtaagggtccagattttatttgtatgcttggaaacactttcttaaaaacataacacatataaaggacttagcacaggactaggagcgtttgggtcctcagcaaaggctgtctccatctccctttcagatgcattagtgttgccatttttaatggcaagggtcggcatctgccacagtccttcccaactccattctcagaatgctgcgtattatgtgctcttttggcacctcaaatccctctcccagaaaacaggattacaggcgctgcatcctacaagcagttcccgggagctattatcacatcgctaccacaacccccagcatcttctcctctttccacctgctgttcatcttccgtatgtgtcttggctggtgggaacttctgtgaaggggtgaacaagagcaaggagaggaggagaagcaaagccagccagagaggtgacccgccagctcatgaggtgaaagtcccctcaggaaagggagagttaaaactcaaggtctgggcattctctgtgcaattcatttctccctgggaaccctgcctcccattagcatggacaaatgagaattgcccatatctacattccatctgccctcatcttcctttgcagctactcaaagcactttagaaagagcctctctttcttcctcccagcatcacctctgcggtggacaagagacaaagatgggagtgcggtgcagggagagaaacagagtcatgaggtcacttagcggctcagctagaatgcacccaggagtcctgacacccgatcaaaatcactcttctcattaaaaggacaaagataaaacctccttcataaatctgaggcccgtctgcattatcctcagccatcagttatgcttgctgtgggccattgttcatttatttaatttaacctttttttttttttctgaaaagcttttgggtttgcctttaaaaacccacattaaattctcgtttaacgatttgacggggtcccctttagctccctttaaacgagctgccgataaaggaataaacttgctgaagaaataagaaataagcctccagaatgctgtagccctttcatgctgtggctgtccaggctgaagcccctctcaaatgaatagagataatgctaatggaattacacattgtgactagatcaggggctgccacagaaagataaataccaaagcaaggctaaggcagttaatcaaaaataaacccctacgtgcctttttttttccagaagcaaaaaaaatttaaaaaaaaaaacccgaagaccttgttttgccacatgcatttcttcattcaccttgatgttatttttccaaataatttggtttagaggaggtcccccacacacatatacatttcaaagcaaattaaattagttaagagtgatctacccaacctatgtttacagtgacacaaatgacagggtggcaagcctctcacaagataaaccagaggtggactaattcgtgaggatgatatagcgcttatctgttttgtttaggctcagttttaacaagataaaatcgctgggcctggtgttctgccagtggggaagctgtttacccacacaattgacgcgcagcgtgggctgttgtggaatctaaattagctcctctccctgcctaccccagctccaagctggttgggttagtcacaccctcagagaacaggtctcaggtctcacttaggaaaaaaaaaaatccacataatggtcatttgtcatctttagggtctcatgatttgtcctggctcatcctaaaatcaagatgaattttgtgacaccaccccaggtaagcagtgacaccctgggtgtgtccatcatggaaatggatgccatctgcctctcctaggcaaagatggaacttactaaaaggacatcagggactcgcaaaagtgagaaggcagggagtccaggaggatggctcaggagaaggccccatgaggccaccctacaggacaggtgggtgcaggcgtggctgcagcactggggcccaaatgtggcctccacgtcgtgccatcactcattccagggaccaagtcacaggcagcaggtctcactggctcagcctaaggcgtatatccacatgggctccctgaagacaggagaaagagggtctgccctttcagtccccagagagggaaacaagtgctgcctgccatggaagggccatacaataggggatttcccaaatgggagaccaggcactcacaaaaagaggttgaatgaaggcaccccaaaactggcaagcggttcctatgctagggctgagaaaagtgtgcctgggcatccttgttcagcccgagcatcaggtgggaagcagtttgcagtgatgaagggagctccgggtggtgaaccaagagacccagacccaggcatggggccatgaccaggcaaggctacctgagctaaggcaagtctatgcctctctactcactgttgtgggttgaattgtgtcccccgcaaaaatcatatgtgaaagtggtcaccaccaatatctcagaatgtaaccttttgggaattagggacattgtagatgtaattcgttaagatgaggtcatactggaggagcatgggagcctaatccaacatgaccggtgtctttataaaaaggggaaatttggacacagacacccgtacatggagaataccatgttctccatatggagttattctgtctcaagccaaggaactaccagaagctaagagaaaggcttgaaacaacctcccctggtgccttcagtgggagcacgaccctgcagacaccctgatctcagacttccagcctccagaactgtgaaacagtagatttctgctaagccactcggtttgtgatacttcattatggcaatcctaggaaactaatgggctcgttttctataaggtgagcaagttggacttgatttgcagctttcaaactgtttgagtcttgacttccacttgaacttccatttgaagtcccgcaacttcgtggcagcacactttgaaaaccatggtgtgatctccaaggtccctccagctctcactctctaaattaaagcccttttcagttttgacaaagaacggttccaaatttagggaaggctgtatggggggacattttcttctccagctgcgtggataggctgatcccttgatgggaccctgctggactccatcccacgtaattccagtctgcttcttcaggcactgagccctgggagaaggtggctacttcatgtgggagctagaaagtatggagatttctgggtctagtccagtggtgtttccattcagacatagatagataggtagatagatagatagatagatagatagatagatagatagatagatagatagataattgatagataatagatagatagatagatagatagatagatagatagatagatagacagacagacagacagacagacagatagatagagagctttgctaggcttagatcctgttagatcctagagactcggtcccactctagactctagtcaccatctcaagttccacagtgaacccaaccacttgaaagattctgtgacctaccacttccccatcttcccacagagacctccagcacccagcagtgatgtccaatgcctcacagaacaataaacaccactttgagatgtatatgatgcccttgttgtctatctttaaacagagaaagaaggagcatggtatccccaatattggaggggcaccaggcatcatggcagactcgattacacaggtatcagaagcctctgcatgggatgatgcctcatggagactggctgcctgactattcatccgtctcccatgctaaattgggagatccaggagaataaggaattctgtgcgcataagttttaaatccccagatacgggtggatcaccaatgagtgctccagagggaagacctgaataattaccttgttcttaaaacccatattattttaaaatctggaaaaggggtactttcacaacacccaggcactaagtcacaacagaggaaaacttgtccagatacactggcccaacctgattctcgttcagtcagtacattggtgacccacatgtagaggaagatcagatagaagttacaaagaagctgccattctttcttcccccaagtattgtgacaaagttgcttcaaatgtatataaactgtttaagattaataaaatgaacactaggtgccctccacctatacccaataattgttatcatcttgtcacatttgtagacatcatgaaatttcacttctggacccttcagcaaacctcttttgagaacgaaacattatcctacataccttcaataccattattgtgcataataaaattaataatattccattatattatctaacatcaagtccctactcaatttttccatcatcttaagaaatatattttatagggtttttttacaattaccaagatccaatcaaaattcacacattgtatttggttgtagtgtctgttgactctcttttaatccagtacagtcctccaacttttttctttcatgacactgactttttgatgaacccaagctgatagttttgtaagtgttgtatattcttgatttgtatgattgcttgtttctggtgttgactgacttgtccctctatcccctagaaatggctgccatcttgacctactaaacactctgagtgtgggctgagattaagagagaagcagggctggatgttcctgttccaagatcttccaggcctctctctccattgagtgaggtccacaccagcacctccactatgacagagccactgaatgcctggtcctgccaagccacagccccaggacgctggagaacagtgctggccctttctggactctgctgcctttgaaactatagtgagcacagctggaaacacacatacaatgccacaaaagattatgaagatttaaaggtttctcagtgatttatgtctttttaattaatggcttttatgctttaattaaaaagttacggaagttgtctttacttctgaaaaatgcatttatggttgactgcttgcatgaattaaatagcatcagacccctaggttggctccatgctagagtcctagagctcattttaggggtaggaagaaggaggtcagggagaaataccattaagaaggaaggctgtgacaactttcattactttttgatgatcatgcaataatttcccatgataaatcatctcattacatctacaaacttggaaacagaatctaaatgccatggtcctgaaaaaaaaaaaaacagcatggaacctggttttaaaatgattcacctcctcactgaagaagcagaataaaagtttatattttattactaattgattggttcttaggtcacactaactacattgggagtacgattgtgcagagctttgatttgggcttccatgcatagtctgctaaagtcagcagccacttctggacctagatgtgaccccagactggctgattgcctgagtcaccagcccggtgctatgggctttgctcaggatcaaggtgccttcctcaattccctctgcagaattatcatgcctttccttgcattcccattgaattcattttgataattcactttgaatttttccctatcattctctgaattacattatttctgttcatgccggtctcccccaatagtttgttgtcttctctataaggccacttctcatttccccagtccccactcagatagaagtcactacatcatcatttgtgtcactattctatcacaagcagaattgttccaaaatatctcaataattccaacctattttttaaatgaaatatgtctatgtccttttactaaattgtaagacctagtggccatatttaatcatctctttttttcttttctatttgactaggctttaggccagagaattgagtcaaccatattcctagttcatgacacattcaatcatgcatcgtctctctccttttattcattcattcattcattcattcattcattcatgtatttatttattccctttatttccctttcccaatcctgttaccttgaccactgactacaaatctgttaaggttaatgagggtcttttgtttgtatgcattcttgtaaaatatgtgtatatttcatgcatatagaattttaatttacatacatatataatgtcatatgcttcattctgttccttactcttttcactcaatattaagttctaagaatccatccatgttgcgctctctctctctctctctctatatatatatatacatccaatctgtaatttttaacttctcaatagcactccatcgtatgcttctaccacattttacatttgttactgcctgttgataggcacccagattgcacctgggtgcaatcccgttagggacctatggaatatatactcaggagtggaatttctgtgtcatatggttaacaaatatgtgtgactaacttgtgctatgttgcccttcagaatgtctacgacaaaatatatattctttttttttgtatttttttgagatggagtcttgctctgtcgcccaggctggagtacagtggtgtgatctcaactcactgcaacctcggcttcccggattcaagagattgttctgccttggcctccccagtagctgggactacaggtgctcaccaccatgcctggctaatttttgtattttcagtagagacagggggtttcattatgttggccaggctggtctcaaactcctgaactcatgattcgccagcctcggcctctcaaagtgctgggattacaggcgtgagccactgcgcctggccaaaatatatattcttattggcatgagattttccatattcctgcagcctcaacaaacattattcaacctccacatttttgtcagtctactacattaaagtaacattttaatttgcattttaaagagatttggattatttctgcatatacttgttagttgttaaggtttcctcttttataagttacctattcataacctttccctgtatttcatttggagttctcatcgtttgcttgttgatttgcaagaatttcctgtgaattctaaataacagtgctctgtcagttttagacacagtaaactatcttctcccaattgtcatcagctcattcactgtccatggtatccttcatctaatagaaatcctgaattttgatatgattatggtaaataaaatacttttctccttatattttgtgcttttaaaattccgtttaagaagttatcctttattctaggtctcaaaggaaatcttcttttaaccttatagtttagtccttcctacttaggcctttaatccgtctctaggtcacctttatatgtggcattaggtagggaactagtgtaatggttatctgtatggtaagtaaatttagccaaatctgttaattaaatagttcatctttccctcattaattcataattcatcttaactgtatatttgctccctatactgactctgttccattgatttttttggctgttcttgcctgaccaccccagtttttgctaccacgtgtttctaatatgtcttaaagtctggaagggtaggtccccctactcactcctcctatgatctttgctttgttggtgggtttttatccttctatgtaaatttcagagtagatgcattgagctctgtaaatcaactggaattttgattcaaaggtgcaacacacatattggttaattggagactaattgatatctttaaaatattaaaaatctatatttgagcatagcatgtgtctccatttactcagatcaacttctatgtactttattacatattaactttttctctggaaggacctcaggtgttcttaaattaattcctggttagttcttattactaatgagaataacactctatttttaaatattttatattttgttattgttgtagaaaaatgccattttgttttaggtagatctgatacccagaaatctttcatttattctagtagtttgtcttgtgttttctaggtaagtgatcatatcatttgcaaacaataacactttgatctcttcctttccagcatttagacttctcccccttttttttttctttttttatagtcaaacacagctatattgtctttcaatagcactgataacggccgtcttattctattctcagtcttaaggtaaatacgtccaaatttttttcaataaagataatgtttactttttcttttttggtgtatttttaccagtttaaggaatttccatagttcctaatttgctaagagttttgtcataaacagctgttgaactttatcatgtatttcttcatcaattgagataattgtatgaatattgccttttggcctattaatacgataagttatgttaatagatttttcttttgttaaaccatccttgctcacttggaataaatcctacttgataatgatgtgtttgaatacattgtttaatttggttagctaatattttaattaggatttttgtacttatcataagtgaaatatgcctatagttttcttttcttacattgctcttacctcattttgaaataaaaactatactaacttcaacttttattccttctcttttcttgaaaataatatgtaaaaggtaggatttcattgttctttgtaagtttgatagaatgaaccttaaaactatctgggcttagagtttggggagataagatgtctttggttatcacttcaatttctttaatatttttggtctaattatgatctttattttattttatcattttattttgggacagggtcttactctgtcaccccagctggagtgcagtggtgtgagcacggctcactgctgcctcaatctcttgggctcaagcaatcccccacctcagcctcccaagtagctaggaacacacgtgtgtgccactatgcccagccaattattttttattttttgtagagacaagatcttaccatgttgcccaagctggctttaaacttctgggctcaagggatccctggatcccctggcctcagcctcccaaagtgctgggattacaggcatgaaccatggcaccctgcctctcattttttccttgtaccaattttgactttttgtattttctaaaaatgtatccattacatctagcctataattattcataacactcttattattttacttcctgatttgtctatagttctttaaatttcatattttattatttgtatcttctctcttttatcttgattagtgtcttcagaagtctattttaccaataatatgaaaaaattcacttttggttatattaatctttactattatttttcttttgttgttagttgtattgatttctgcccttatatttattatttcatgtattcttgtttctttggtttaatcccatacttctgttttgactttctatctccagagcttagcatatacttagtacacagaaacttttttctatcaaatatttattgaataaatgaattgtaaacaccttgagatcagataatatgttttgtcaatcttcatagtcctcaaaatacctactataccacttagcacatgggagggttcagtaaatattgagggaatttttcctgaaggaatatttaatgtaaaaaaatacatatctatttaaagaaacctccagaggtcatataattgagccttctgagtcaaaagaaaaaaaaaaacagtaaacatttctgatagtgtggtagagcccgtgagagattccccccattgttttcttcttccttagtgacagaacccctaattctagctaggcacacaaccatctgaaataaagacaaagtgattaccttctggtcaatgggatacaagtgaaaatggtgggtacaacttaagaaagtataaagggaaaagatgtgtcttttttcctcccctttcttagtcttgctttcttgaatctgcatctcatggttagggttccagtagttaaaatggataaggaggtgaccttgggaatggaagtcttacatgacagaagaacaagataaagtgcctgggttccttgtacccggaagctttcatggtagcccaagatgatagcttttgaacttctttatgaaagaactcctctgttgtttaaggcacagtttggggtctttttctgtggtggcaagagggaggtttctgtcacatgtagctgaacatattaaatgattagaatagagggaatagattagtaattgattcagttggtacttgttgatccttttctgaaagatgtccttgcacacacaacaaagatctaagaaagaagttgatgttaaatccccatttcacacatgagaaaagcaatgtgggagctgagactatgatttatctctcattcttactcagatctcaatttgctggacaagtttgccttttctaaatcaatgaggcccagtcccaaaggtttttaccatagaagaatctaggtttactcatgtaaacactgaataattttcagttctagtgactgcctgggcaaaatccaagtaagcctcaaatttttcagactctggtatgatttttctcaggtttgactctctaggtagcgaggtaattagactccctgttcttttcaaggtcaaagaccactggacaaaaatatgagaactttgtccaccctttgtggctaatgagcttgactctcaaagggctatttcacctccttcatgagttgtcatttggagtccactctctcagtcatggctttgcagggaggtttggagctcagtccagagcaagctccccagatgacagctacatgctctataacctatacgaccaagagaccatgttgcctctgtctaccagctcctttatggccccgtggtctccttgttgttatggggagtttctcagagtgttctgctcaaaatcaacttcaaaatcacctgatttacattaaaaaatatttgcttttgtgaccaggagaaaagtttgcactcaagacccaaacaagcttcccagtctttctttccaagccccaaccctgatcctcacacacaaggaaggtttgagcttgcagaaaagacatttacccagccaccaaaatagttaccagggatgacaaggacctgcctcccatcttagcgagggaagagagtacaagagggatcagagacatgagaatcagccattgatacagatctgcactgtgaagagacacagacatggtgagaaggtcgtcagactctcattgtctcacctttcaatggattcttctctacccgtggaagagtcactgagaagtggaaagatctctctaatgccatcgggaagtgttagtacaattctatgaaccagaagaaacatggaaaaagaaagagaacttctcccccaccataaccaaaactttccattaagtatgccctatcaaccacttacaacccatcaatcaattaaaaaatgaaagaaataccaaaagtacccagaaaagagctgttagcctgcaaataaaagcatttaaaagtttccctattttccttcctttccatagtatgtttctattcttctcatagccagtttgctggtttcaattttccttgaagaagctcccacactaatgagattggttgtttaaatgtctccaagaagcaacatagactgctgggatctgtattctctttattgaaaaaaaaatatcaaatggactgcagagattaaggtggaattaattccaccccgggaagagaggagccgagctgcttcagtctcttggtttataaggtcaccagaatcccttgtcaggaactattcctccgtaaatcacttctgcccagctactcggcagccctgagttgcagataatccagacagtgattgtgtctggtctctaagcaaaagattcattgacctcccctaagaggattctggtaccagctttgcctgcaggaagaagtggacgagcccagcctctaatatgcaccagcttttttgaccacctgctggccaggattcagtctcacaggtaaacatcttgagtagagaagccactgctgaaagtacagattctgctatgggagggggcctgcattccccaggagccagctcatacagcatgcaaaagggcagggccaaccttaggacttgggagtcagatattggacttcaaccaagtatattagactcccagctgtgaggaccggtgtatatttatatttcttccttgagtatggttttgaattttaaaaactgtatcacactgatgagtgcatatttagctaccaattaattctggccttgagcaaatcacttaatttggggcggggtcctttgtttcaaatagatctaaattaaaaccttgcatccactatgtattgatggtgccttattgggaaagttaatgcatgttttgcaaggttgtggtgaggatttaaacgataacatgcctaaagtgcctagcagactatccaattgggttatttgcccagctgtgcccaccactgtccacacccctcttctgtgaagttccttgtgttgcaagggtgggtgctaaggtacctgactccactacccctctgtgttctggcggggggcacctaacacaagccaggccaatatgcatgcctttccccaagattctgcactggatgagtgctgagagaaatcagtctctctctggatagtggcccatgaactcccactagctcaggagctgatggggaccctgtgctctgccaaccagcctggaacaatgggaggagctagtcttcagatgaagagagagaagaggaacatagatatacggacaggaaacaggagacagggtagatatcattcaaggctctgcttctaattcatctctgcccctgggttccatgaaactcatacccttgcatcctcaaaataaggttctctgtctcgtgaaaagtagcttgtgctggtttcgttacatgaaatagaaaagagtcttaataatctggtaaacagttgtttttcaataaacagtaaacatcaacttatgtaatataagagaattggccaagagatgccacaggttctcctgccccaccccacccctgcccagccaactatctgacttgatataattacttactgggacatcttccctatctatatatcctacaactactttgaactaaacttatcattattcaataactcattcatttgataagccatttctctgtacagatgcagggaccgtgacatacctctattcccatgtgcagatggtgacatctctcagtcctgtcccctagatatgactccgcttgcaccggactctgaccctagccacagcctctccctgggactcaaccctcctggtcctgcacttccctcttgtcccagcccttgatggctcttcctttgttgactccagtcctagcagtgcacaccagcccaggctcagcatcaacctaaaaagcagtgcttttaaaaggcaagtgtcctcagcactcacaataaaattaacaaatgtgcaggccccatgctgagcactctgcaggaatcatctcatttaattctcacaacttacgagattggcactgttcttatccacattttattgatgaagagaatggagcatggggaagataagtcattttattcaaggtcacacagttaggaaacggcagagctaagatccaaatccatgcggcggtgtgccaaggccatgcactttgcctcgtagccccggtagatgagaccctttggactaggcattgcttttgttatttactgtactgatgaggctatgtctgagaaacagctgtaagaatttagagaggggatccagtgatagagtcaacagatctttgtccccaggatttggggacaaggcagaactagactttggtcctggagaacaggtgggtgacatgataagtggtggaaaggtcaagggcttggaagcatgatggtgcttggggggcctgttaggaagtgggtaggtggcattggtagatttgggccaattctggggacacagaaagccaggcagagttggaacttggtttggttattattaataggttaaattgtgtcaccaccacccccacccctcacatgcacaaaaaaatgttaagtcctcagccctagtacttgtgaatgtaatcttatttggaaatgaggctttgcagatgtaatcaaattgagcagagatcagactggatcagggtgaaccctaatccaatatggttagtgttcttatacaaagagggaaatttggacacagagagacccacaggaagaacatcatgtgaaaatagaggcagagactggagccatgcagatgcaggtcaagaaacaccaaaggccggctgtggttccagcactttgggaggctgaggcaggtggatcacttgaggccaggagttcgagacaagcctggccaacatggtgaaaccccgcctctactaaaaatacaaaaatcagctgagcacaatggcacacgcctgtaacctcagctacaagggaggctgaggcacgagaatcgcttgaacctgggaggcggaggttgcagtgagccgagatcatgccattgcactccagcctaggcgacacagcaagactctgtctcaaataaaagaaaagaagcacggagaattgacagccaccaccagaggccaggaagaggtaaggaaggattctcctgagagttccatagggagcatggccctgcagtcaccttgattttagaattccagccttcagagctgtgagagaataaatttctgttgttttaagccacctaggttgtggtactttgttatgtcagccccaggaaaatagtagtcatcatcagaaaaacctagttccttgagcaggttagggtaacaaaagggaaaccaaccaaggtcactgggtcacctttgaagtgtgtaagcacacgttctatacattctcatgccactcagttcagctgtatgcagttttctgcattcacctagtgtttctcgtaggctaaatcgcacataagtaaatgtgaaatctgtgttatgctcaaatcattccctaatccatcaattgcattggaacagatttgcatttccaaaacaagcattatagcagaactaactgaaccaccaaactcacacagagagttagcaatggggctgggcacagttttacacgtaactctctagattcacagggccacccctgactttaagcctgagaaaaattagggaggagggagcacctgatatatggcaaaaaatttcattcatcagaaagcagctcgagctctcatatatttagaattctctgccttcaacttcagtagaagcaaatcacgggaaacaagctgatatctggaatttagccaaacaaaatcaggaatgcatcccaaagtgagattcacacagtcccctgagccttccacacctatggtcaagcataataaaaactggcatttttggaatggggtttctgaatcatgatcctggatgctttctaaatcaccaaatcaaaagtagataatgttcaacattcaaacatctgaggaaggaaaatgaacagaagcctttgaaaaagtttaacgagactaaccaaaacaaagattttcaataatccacagttaaccaaaaaacccgcacccagagcattccagttcccagaggctgacctacacatacacccaagagacatgccttctgagcgtggtttcaaattctagagaaattgccaatatggctcaagttgtctaaggaaaagcagcctctctccttccttccaccttctccccctcctgcctcactgctcaccaaccctggatctccttttgcgtccctgagagcagacagggcctctggcacctagctaggagcagcccagagcacaacaaaagagcagctgcaaatccatactgagcagatgagaaatcaaggaaaaactttatagattgagagatggatagttctgaaacgtaataacaaggctaaagggattggagttttatctacctttgacagaagcaccttaatggggccccttatgaggggctatgagagcaatgatcactgtgtaaagaagatgttctctgagcctgtgcctttttgcagcctagaagtgccaatcaaatcactttcctcacgttaattaattaggcctcttgcattccccaaggaaattcagaacagaagcattatgttctggaaagaggaaagtgagcagcatcacatcatcattatcaccatcaccaccatcatcatcatcatcactatcaccatcactgccatcatcatcatccatatcaccatcaccaccatcactcccatcatcctcatcactatcaccatcaacaccatcaccaccatcatccttatcactatcaccatcaccaccatcaccgccatcatcctcatcactatcaccatcaccaccatcactgccatcatcctcatctctatcaccatcactgccatcatcctcatcactatcaccatcaacaccatcactgccatcatcctcatcactatcaccatcaccaccatcaccaccatcatcctcatcactatcaccatcaccaccatcactgccatcatcatcatcactatcaccatcaccaccatcaccgccatcattctcatcactatcaccatcaccaccatggccaccatgatcatcatcactatcaccatcaccatcatcctcattattccatggggataatgagaccccatgctgagagctgtaagaagccagctgggcacacactctccaggcagaagtgtgcagtaaaaggcagaatgaatagttcattcatttattcaccaacatattaattctatgcttgttgggaccgtactctgtattagcatgagggctacaggtagaatgaataacacagagtcactgcactcgaggaacactcagtccaatggcaaaggagaagtacactgcaagcattacagtgaaagtgctctcagagaaagctggcccaagattctaactgcccaagaaagtcataaggcattcaccctttgccctctgacacttaccctgtggccaattcatcaccaagtttgcccagtctctcctctcatggagacttcaatccgttccttctgccactgcttccattcaacccctcccagcatcccccacccccgcactcctgcgacagcctaaaaacttgtctccctgcctccactcttgcctctcgtggtccattctccctggtgcagccagatggatcttcccaaaactgcaaccctcagggattactcactccactgactaaaaactctccttgtctcaaggaccacattcaaactcagaaaaggcccttcagggtcagatgcagtcctgctctgccgtgcccaggtgggactgacactggtcaccctgtggtgctcactctgtctgggacagccaggaactgccacccctgaggccttgctcacatgttgtttctctacctggggggcccttcctaccctgtcactacctgctgaaatgcccctcatccctaaaggcccagctcagtgtccacatgagtgacatgccacagccccctccgtcccattcccagtgggattcatcacaccttgattatagcattttacacgttttgtcataattacatttctgtatctcccttccctcccagatttgcaattctttgagtgcagagccagtctcctcaatgtcagagcagtgcctgacattgagtagggccactcagtaatagatggtggaaagagtggtcagcgacaaactgtttccaaaatgtgtccatggctgcttggaagtatgtgagttgctccatcatgtggttgtaagtcctgcagagtaaaagcctcatccttctttcacatatggctaaccacaagagcatgtggtttgtgggcaatgtcctggagtgatggggaatttgccctggaccagccttccccttagtcccttccaccacccttcttgtggctatcgtcatatgtaggtgatgactgaatgggggttggtggccattaccaatgagctatcactgcagatggccaactacaacctgctcatttacttttatttactgaattagactaatagatattattatcctcactttataggtgaataaacagcctctctggtgttaagttgcccaagaccacacagctagtaagtaccagagctaagatttgaacctctggctgtctgactcccaggcctaagttcttcccgctacactgggctgccccccattggcagtgggagggggaagcctgtgggctgtagagcagtagctgggacaacattgactctgcgtcctgtagggccaacactccatgagcactggcttttatttaccttatatggtgaaaagagagatgcccattttttcccatttctccagactctaacagatgggtgctaatttggtaagtgcaaattatctggcttcagttctatccaccatctgcctgcttgaactagtgaaaccagggtgagttgtaattatgcccagctctcttcacaaggtccttcccttcctttagatgagtttatcctcttcctattttaagaaagagcttcacatagcagggcatttatggaacacttccaagaacccgagcagagagtgaaataatgaaggcaaagcaatcatgcagacaaaacccttacacaagatggcaggagccccagcctggccctgctcctcctggggaatttctgggaagatgggaaactagtcactacaatccctgggcctcaatttctccaccagagcactggcagtaggagcctctgagactgggaagtggagctatgctgtgtgcaaagggactgctctgctattgctgctgctgcactggcaggcatttggagggcatccctaagcttctcatcctcgtcctctgaaggaagctcttcagtcccctctcaaaggttcttcctagtccccccatccctgctaaaaataaaaggctgaatttcatcttattcagaccatagctagaatacaggtgcttaaagctccctctctctctgctgtctgcagcaacctgccctaacattcagcctctacaatgtcttcaagactaaaacgtgcatgcatgggaagagggtcatcaggctaagggaagccatttacccaacccaaagtgcatcatttaaaccccagatgtcattcattcttatctgaaggaatcctttccattcatttgcctaaggctcctcttctcctcccagtttctgcctcctggagagagcatcttaggagataaccacccatatagcacagcgaaggattccaccttgagtgccatgatactgcctcttggaggagcagaggtttgccacttgtaatgtggatgagcaggagggtgtctggcccgtggagcagttccttgtctgtccccacaaggaagggaagcttctctgtgtgcccaggcacccccatatctcttctcctccagtcactggtctccccaaccccaatcacacagtcaccccctttccccatctctgagactggcaagtgagccagtccccccggccagcagccaagtgaatttttaaaagtctctctttgacaaactaagagggagagttggctgtttcatttggtggttttctttagcaacactgaaatgtctaacatctaaatgtgtggtgtttgcgaacttaaatatgtcgcctctggacctgccattccttaagaaacatctgctccccagaagatcagaagtgagaaactgcaaagttgcattacttatctttccctaaagaaatgaaaggtgtttttctccccctcaaagtaacagctctttctccactccacatcaaaactccagcctttggcaaacatatcttaacgcttccaaatccacgctccgacacagaacttcagacttcaaaagtgacagcagtggggccaagcccggtgcacacttctcagtacccaactccttcacaacttctgaacgtctccaagaaagatcagagggcagcaaggctactgtgctgtgcccacgtcataacgtgcacccaaaggtgggggaatttattaaacaacctggggcatgatcctggaagatgggctacacacaaatctccccataggtagagtctggcctagaatttgaaaactgtatctaaggctgacaatttagcaagggagaccagtaccaaaagaggagtccagatacctgtagtgagagagaaccagtagaaagggccctggaccttcagccttctctgtgaccttgatgctctcagctaaaaagagatgcagctgcatattatgagcaactaaagtaacagaagttttaacaggcagggcacattctttcccctaaaaaaggctggaaggagggaaagagtccaggggctccatgaaatcactggagaccaaggctgctgactttgtgttctgccatcttcaaggtcaccttaaggctgcttcacagcttccattctcaaggtcatcagtaggtcaagattgctgttttgagctcctgctattacaccatcttctagggatcaggaaatcagaaaaacaaggcaaaatgtccccttgacagcaatgcatgccaagtcaactccattttagcaaacttcccaaaggatagcacatgtccgcttacatctcagtggccaggacttagtcacatggccacacctaactgcagaggacactgggaaatagcacctgttagctacatgcattgtgtgacctcgaaaaaaattgggcttcttttactaagaatggaaggaacaacagatgtgatgtagcacctggcagtctctgtcacagattcaactttctacctgtcaaaagaatgtgttcatcctggccaggcgcggtggctcatgactgtaatcccagcactttgggagactgaggtgggcagatcacttgaggtcaggagttcaagaccagcctggccaacatggtgaaacctccatctctactgaaaaaatacaaaaagcagctaggcgtggtggtgcacaactgtaatcccacctacttgggaagctgaggcaggagaatcacttgaactcaggaggcagaggttgcagtgagaggagattgcaccactgtactccagcctgggcaacagaaagagtctccatctcaaaaaaaaaaaaaaaaaaaaagtcctcatcctgactctttctccctctcagcactactgacattttgtgcaaataattctttattgggtgcagggagggcctgtcctgtgtattgttagatattttgcagcacccctgagcagttgtgacaacccaaactgtctctaggcatcgcccaatgtctcatggaagacaaaatcaaccatgggtgagaaccactgatttctatcaaaagggcatcaaaatgagattatacacatgatcttcgtaagaatatatatacatttactacattacacagtcacctagatgtaacactatgagaaaaaaaaaacggacttaatctttatgctttgttgaaaagatgttaagagaccagtgtagtccttgacgcttctgaagttccaaagagtaaactcggaagacagagaggaaactgacctactagcgattcctctcacgcacacaaaggttggactgcagagaaaatgccctttggtctcatgcagctttcctcctccctccctgggcttagcacaccttgcacttttccaactcgggatcttctcgcatcacattctcagcctgggcctcctctcctctgctctgtacatagctgcctcctcacgccaccagcttctactaaaaggtcactgccaccaattgaccatgaatctgaataaagccaccctcccccccgacatctcctctgaatcctccatatcacagttcataattccatgtgaatctatttactttttaattatcactgtccccattagattttggcttctgtgaaggcaggggccatgtctctttattcactgctgttcacccatattccaccagcacctggcacaggaaagtgccattaagtatctggtggctgagtggatatggcaatgggggtgagacagtgtgctcctgtggtgtgtcagtgagtgggcgacggggtgatggagaaaactggaacacagaccaggacaaacgcaaagtagcatgtgtgatattcttgcacagacttaatatttccaagtcagttatacgcatttgttggctatctatacctgaaataaaaaaataaacaaaacacggccacaaggacctacagtataacacagaagataaaatatattttaataattacatgtaaagtctgctaggagtgtatttttaaatccaggaaaaaaaagtaaaagaaaaaaatgttccacagttctgaaggtgggcaggttacttctgcctgtgggcgtggggcttcaaagggcaacattggaaggaggttttgcaggatgcataggagttgcataggtggaagatggggagaccttctggagggaggaacagcttgagtaaaggcagtaagtgagaaagcccaggactttgctgagaatgtgctttcacccagtgctatcctgtagaaatgtaatgtgagtcacatttttctagtagccacattagagaagtaaaaacgggtaaaattaactttttaaaattacattttatttatttaacccaatattaatattcaatattttggatatccaaaatgttattccaacagatcaacaatataaacgattattgaggtattttacactctttttttcagaacgctaaaaatccaatgtgtgattgacacactgcacatctcaattcagactagccacatttcaagtgctcggtagccacatgcggccagaggccctcatactggacaggtctagtgccatagcgggagtgggtttaagcaggcccaccctgaaagatagcaggatgcagcagacagcgggtgaacttggaacaagcgtatttaatattgttttcagcacgtaagttgatggaaataaagctcaaaggtggggaggcactgaaggctcagggagcagtgttggagcagaggtttataaatgtcagacccacagggagggtgcccaggcaaggctggcaggcaccagacgcaggccccagcaaccacagctgtgtgcagcgctctgatgcctggccacagctgacgggacagaggcacctggcccaatttgactaatgagaaatttccaagaaatttggtactagttcagtttattcaggtctcttgaatggaggagatgtaaatacttgggaaatgccggagacacctcccaccgcggaactgagccgcggagaaaagcaagctgcagagaaagaggaagcagatgtgcagagaggcggagatggaggagtggctgggaaggtcgcctgtgtcccgccggcttccaagttccagagccttccggagcctcttctgaaatcctgccccctggcttcccaagatgtcccttgcccttaaactgtaataaatctctctcccccgagccctcgccctctttcagaacactggtttctattccgtagaacaaaagatttagaaggtcttaagaaataccatcagcacaaggctttaggacacgccatggttttgcctccctacctagggacccggcacaggggcgggaagggaggaatctgggagagctgagattctagggctttggttaccggtggagcgggaggggggttcgggagatggctgaggttttgagcctgtggctgggaaagtgatgatgtccttcacagagaggggagtggtggcagagggagcagggccctaagggaaactgacgcctgtgcagcacgaaccccactcgcgtcctgtctgcctggactgccgccgtggggacttctgcagcccccgcccctggcggaggggacgggggctggggctgctcccaccaccgcaggcggcccgcagtgcccggcctcagcgtccctggggctctgggttgcaggctttggctgatggctgagggctctggacgcaacgaagagtcacttctggtgtccacttcgggatctgtctgacactttttctccttcctgcaccctgtagcacctgctccttataccttattccctgcttctgctcacctccctgctcttcttcccttctgcggcccattggagtgagcagggaagtgacgcttttcatgtcccaaagctgggagaccccatttgagccagaggaagaaaaactaacagactctgtccacatcagctttcagcaacgtgcacgtgggtgcacacacacactcatgcacatgcacacacacacacatgcattcattcgctccttctccccaccgctatccctccctctcccctctcctctctcccctctcccttctcccctctggagacttaacacactttttgacagataaaggatctctctctctctctctctctctctctctctctctctattccccaccgcctgctttcgccctatccccaaatcagccagacttagctagcaacacgcttcccttggagtggatccctcaaaaatttccagccacaccaggaaaagcaatggcagataacgcccaaactccctggtcatgctttctcttggctctccagtccaaggctgcattctctacctgacacacacatggtcaccatgcaccccacacacccactccatgttccatgcacagtttaaaaagcacgttgcctcttcgcagtgcttctgcatttgctggctgcaggcaagagaggagaaaatgtattcagcttcctctgtctaccttgcctgcctagcctgtctcagcctgttctctaagggcctttggggtattgatcctaaaagcttctgcaaagggaatcataatgggaatttcatagccaaggaaactgagtcacttgaggtcaagggctgcaggagccttgttttccaagagccctcagcacttacaacctaagaggctctgtgtcctgttctccagcccagtggcctccaaacatttttaattgcttgactcatccataaaactttttgagcatccacccccagtatatacatatttatttataaattataatcacataaactacatgtctaacattatttatactacaaatagacattatagtagatgtaacagacatactcaaaatatagaaactgtaaaaggagaaaacaaagaataaatataactcaacattctattatgttcttcctgcgcccagtggatcctcttgtgcacctcctggaatatgcacctgtttgaaaacactgcgtttacccaccggccctttcacgggtcatctctgtggtagactgtgcggttctctgacccttccagttgcccttcctttccagacagacagaaggaccctactctccaacccatgaagtaaggagtggctgcatcacttgctctgtccagcaaatgggtcccttctgattcggagcatcaagaacttcccatgccctctctcatcttcaccacaaagaaccctgaagcctcatgttggatggtagagtcataagatggtcatccaggttgacttgagtggctaaagtgagcagccatgttggatttaagatatggggggtttcgttacatcagcacaacctagcttctcttgactgatcctatttgtaaagaacccgattgccaccttgggcatgggtttgttctctgaggcttgctccctcccagctgtcatgctgagagggtgcttctcagtagtgacagggagccacagtgccacagaggaaaagcacggggtggtttgagggatggggtcagaatgtaagaaacggctcagagtctgaagactgatcaggaaggcactatgtgggtagacttgctccaggaactgatgggtgctttccactcttatcccagggccatccctgaaccctgggctacagagcttcaagccagagagtgaaaaatgcctctgtattccctgtttctgcatgtcctatgtcttcctaatggtaaggagtttgatttcagaccaaatacataaattattttcctttaggccattctttcagcaaataaggcagtaattactgtctcttagaaattttcacagtaattaaattggaagagtatctacatcactgaggcttcctcccatgaaatctaaaacactgacaacccatttcccaaatgcctcccagtctggttgatccaaggactgctactgaattacactgtgggatcccaagtggataagaagaggagattagaaattcagaactctctcttaaacctgatatatgacctaaaatgtttctccagctaccagaatagaaactaaataagagttgtttataccagatagaatctttttctctgcaggtcttgggctggtagggcaactctgctgaacagtattgtttctgcttcattctttctcctctgccacctttaccattgagcttccttctcactatgtaaggtggctgctccagttaccacctccaggcccactttccaggcaggaatcagagcaggaaggcagacccttcatcttatgggtgcaaaccagaaattgcccacatcattcctgctcaggtctcatgggccagaattgagtcgtatggccaaactcagctgcaagggagcctgggaaatgcagtccctagctgggcagccattggtcagataaatttaggtgctattactaaaggaatattagtggacacctagcagcctctggcttcctggcaagccatgtggccttcctcaggaagcttttcctcctacctcaccatggcccatgaactcctatactgttattcttcagcattcatcacggtgctgggtgaatacctgcttactcctctctatgtcccattaggggaagcttcatgaaggcagaggccatgttcattctgtctgtttactattgcatctccaggccctggcacttggtaggttcttaataaatatgtgttgaccaagtgaactatttcacaaatgattatgtgaaaagataattgtaattaacctctgactgttctctgcctttcactccctgcttccctccagttctgcctaacttggtctgcctctccggtttttcctccttgtcctctaggccaggctcattcaggccagacaactgctttgggcttttgtaatgcaagattgtgaggcaaggagcagccagaaaagtagcagaaggtttatgttgggaggacagaatcatgacattctctgtttagcccccatgaaatattttaaattccatttacaaattaacaattttaattagagacaagaagattatatcatatacatgaaatatatcacaatcatgcattcctgtccaaaaagattactgtgaaattaaacataaaaagtgatttctggtagcctgggctccatgagagaagtggacaggaaagaaaagtaggtttcagaagtatcactatggacatcatgaaattaaaaaatgcaagaagaggacagaaattatttggaaattttttaaattcattagactgtatttctatgacccagacactgcctggtaactagacaagttgtggctcagaaggaaatgactcagaacagtgggaaaatgtcagcgaagtgtaaatcccaaaaaaccttcttaaccaagatttccgcctgttttgaatccttaggaaaaagaacccttaaaaagagtgaagtatatgtgtatgtttctcaaacttttccagatagtatcaagcctggaaatcatgacattctctggctagcccccaagagatattttaaattccacttacaaatcaacaattttatatggggacaagaagattataccatatacatgaaatacaatctcacgaccatgcatacctgtccaaaaagattaactgccagattaaacataaaaagtgatttcagaatttttctgttaatacttatttgctactgtttcatcagctttattgctgttgtcatttgtgcttgctggtatgtaagcaactcaaaaatcaaaggaaacatctatggaagaaaaactgtaaacagagaaagttctgtgaattgactaaatgttttgtattaatcaggaaaatatctctagattacaaggcccatgaacaaagtggcaatgactgtcttattcatggctccatttcagttcctggttagtgtatctggcatattctagaagctaagcaaagatgtgtgatcaactacttgattttagctattgaacctgcctcactccaactatcagactactggaacataattggagaactactaggtaacagcaggactccttgttgtccatttttcttttttggtttttgagacggagtctcgctctattgcccaggctggagtgcagtggtgcgatctcagctcactgcaaactccgcctcccgggttcatgccattctcctgcctcagcctcctgagtagctgggactacaggcgcccaccaccatgcccagctaatgctttttgtatttttagtagagatggggtttcactgtgttagccaggatggtctcgagctcctgacctcatgatcaggctgcctcagcctcccaaagtgctgggattataggcgtgagccaccgcgcctggcccatttttcttaataagctcttttttgatggtaccatgtttaagactacagggtcacatgatcacctaccagtcttgaaagacataatgacacattcagtatgcacgttctcataatcccacctactcttgtgatttctgaggtgaccctggataagcggcctgcctctgattaggatttctgagaaggttcttgttgttctgtttagtttttgtttctttgttcaaggtcttaaaatgttaagataataacaaaacatgataaatgccattggtatttatatttgcaaagtccaaaatatttgagtttttaaatttattttatataacatctttactcttattaatttgtttttaattatataactagtgcattgaggatgctttagggttattaaaatccaaacaataaaatcaaaagtctccttaattaccatgtcaagcccagtcctctctcccaagctaacaacattgccctggtttataaccttccagactcttccctgtgctttgacatacataaatgtatatgtacttagagagatttgtagtttttgtcttgttctcattattatttctataaatgatgtaataggataccttttgctctgctacttgctgttttcatttggaatatgtcttaaagccctttccacatccgctcatataactctaccctatatttttaaccatttgtcttagtcgttcgggctgctatcacagaataccatcaaccgggtggcttaaacaatagacatttatttctcacaggtctggtggctgaaagtccaagatccaagttctgaccaatttagtatccagtaaaggcctgcttcttggtttgcagatggcctccttcttgctgtatcctcgcagggcagagagatcatctctctcatgtcttttcttataagggcactaatttcattcatgagggctccactctcatgagtaaatcacatcccaaaggccctaccaacaaataccatcacactagggcttcaacatatgaattttagggagacaaaagcattcagtccatagcaccattccatgctattctataattcaagtgaaccatagtttacttacctagtccctaactgctggtcatttaggtgatttttaatctcttggtttttttttgttttttttttttggtttttttgtttttttttttagatggagtctcactgtctcgcccaggctggagtgcaatggcacaatcttggctcactgcaacctccgcctccttggttcaagcgattctcctgcctcagcctcccaagtagctaggactacaggcgcatgccaccatgcccagctaatttttgtatttttaacagagacggggtttcaccatgttggccaggatggtctccatcttttgacttcatgatctgcccgcctcagcctcccaaggtgctgggattacaggcatgagccatcgcacctggccaatctcttagtttttatacattgctgcaaaggtatcttatttgaggcccaccatatacatgggcaagtgttactctaggaaaaaatagtgagaaatgaaattgctgggtcaaaggacatgaacacttaaaattgccataaatactgataaatagcattctgaagtggctgcaccaatttactctcccacaagcaagttatgaaagaaccagtttccctaaacctctgccatcatcatcaaactttaaaaccatttcaaatcgaattagtgaaaatggtttcccactgttgttttattttgcccaggagtattctgaatgtggaaagtcaactacattgctgctatttaacataatttttctaactctatttcttgccctcttctccccataaataggagactttacctaagtagatagtagtagcagagacagctagctatcctcctaatctcttttccttgggcacacacctagactgtgtttcccagacttcttggtggttgtgtagagacttactactgggttctagccattgaaatgtaaatggagtgatgtgtaccgcttccaggactggcctataaaaaccttccgcacacaatcttccatgctgtcctctcttccactggctggatataaacaagcatgatgagcgtagaagccacatgttgaggatggcagaaatacagaggaaagaggaaagatgcctgggtccttgagtcaccacttgaaaaagagctattcgccaatcctgaacaactgttttggatttaatgtgagcaagaattattcaagcatttgtggggttatttattattattacagcaaccaccagtattgtggtgaggattagctcattaaaatgattgcaaatgctataaaaaacattgggaaaataatcagggagtcatcctgggcatataggtatacctcccagcacagaatactccatcttacaaactgtctaaagaattaggagctatctgaaggaaaaaaaaaaaaatccctggcctatgtcacaggttagctaagaaaagagatttcttccattttctggtccccactgtgacctaagaactacttcccagatgactccagttgttggtcagcgcatcaggcttgagggaccctgttcccttggaaatgtcctgtcagacatcagagtcaattactgcagagagtctagatgctgcagaattgtttcatctgaggtcaacgactatttaaaatgccatttgctattaggaagctgccctcgagctcagggccaggggtgaagctaccacatggttaccaggttatctgttgaagttgactttctgtggcatggagaaattgcccgaggtagagtcatgcccagcatttctcatgaagcacggctgcccagccaggtgactgtcaaagctatttgtgcaggctattgttccatagctgcgaaaggaaaccaacccacccctccaggtgacccttccagccccttctccattgggtataagaactaaaattggctgggcatggtggctcacagctgtaatcccagcactttgggtggctgaggcgggtggatcacctgaggtctggagttcagccgtgcccaacatggtgaaaccctgtctctaatttttgtaaaaatacaaaaattagccgggcgtggcagcacgtgcctgtaatcccaggtactcgggagactgaggcaggagagtcacttgaacccaggaggcagaggttgaagtgagctgagatcacaccattgcactccagcctgggtgacaagagcaaaattccatctcaaaaaataaaataaaataaagaaagaaaaagaaaagaaaaaagaaaaactaaaattaaagtcttcataccctgattacattccaataatgacaacaaacagtctatgcctctggctgccctgggaagaatgagaaggaatgggactttaaaaaggactcacccataagtcacatgcaagttagaaaagatcaaggagccagactatccagctccttccaccatagcagcagttttcaaacaatcaaataaaacagtcaaaggagagcaagcctggctgaagacaaggagaggaggacctagagtccctcctgtttgctctaccccatacccatgtgagtttctccctgggaccctggggctctacagagaacagtttaaaaacaaccactccaaaggcctttacaggtgacccatccaaaagtctagcaggaagcaacccccaggttgtacagcacctcacccaaaggtggcagaccaccaaatgtgaacctggaaatcttaacgttggaccataaagccaagctgcttagttgctttttgcctgttgtactctgagtacctggcttggtatccatcacatatcaggcacttaatatttggggaatgaaagaataaaggaagcttagtctttgaattgccatcactaatagtcacagcatattggccacatagcatttcacagtttatatagtactttcccttatattgtctcattcaatattcagaacctactatgatgtagtcaagatagattgtcatttaatagaaacagaatgtcagagagatttggtgacatgctcagtgccacaaagctagtcccaaggcagttgcaagactggaaccacatcttcaggctccaagtacccgggctctttatcctaccctcactgctgagactctgatgctgccatcataatggtagtacccgtggtgatggtagcatactattcattaagatcatagcaatatgcaaagcacatacagactccagtccctggccataagcacatgcctggttggttagctcccatggctacaggttctgtctcttcacactgagaaaggtgatcctttctcatgagcatagatcacagagcccatgccaaatagtggaaatgtttatgccagaggtcacatgggggtgtgtgtgtgggaagaatagagagaatgagcagatcagcacaaactcatcctcatgacctagaaaccaattcaaagcccaagtcctacttcatatgaaaagtcacatctgggggctactcaatcttggaaagggaagcatgagcttgaaaactacagttcctgggtcctggtataagtcatgaacttggtccatataactcacagattgctgatttagtgttcagtaagcttagggttaaacaccagccccaccagcaaattttgcaaaggctgccctatttaggctccccaccacctgccacgacctttagaatcaatttcaccataaatctcaaaagctcacctacctctaagtcagtcctcaagcctgaacaggaagcaagtgtacaaagggtcctgagtaaaagagaacaaaccacccaagtcctcagactttcttctgcttctagattgcccaatttattctccttgtataaagtagataaaataactcttccccacaaatggccaatgctgtgaatgcattttcacccacaggactctgagccccccaaaataaagctatttatttggccttcacgattttttcttctttgttcttcaaacttgtcctctacttactttttctatctcaaaagtgagggctaggcaatttgaaagaacctaaaccctccgacggggtacagaccgatgacttcagcccaagagaggtggagagtgccaaatcaagcctctctgggttgagagtcatgcaaccacatgatgaaagcccctccagcccagcacagtgctggatcctgaaggagcagaattatgaaggtcaagggatccctaactctgctcttctgacatttgtgtccttaaaatgcaacaactacctccctaccctgctaatacacattatgtgagttcatctccaataaaactggttaattctgcaatatttcaaggggatattcccctctctctaggtactatcttttcacaccattcacatagatcctgtagagcattgatcctctgtcacatcaagcaccagagagaccatcacagaaagcaggtctgagaggcagggtggagtgtgtggagtcctaggcagttacaggcctgagatcccctggctttcatcaatccgttcatcctcatgcatttggcacatgtgtaccagcactgtgctgagtgctataggatgtaaaggagtaaaataattttcatactatcactgcaaaagacttgcactgtcattgaagaagtcagacacaaagaagtatgttggaatggtagatcaacaacaaatatccacatattgctgcatacttcataccagtgtctcccctagggactgggatacagcaaagaccacgacagacaaaaatcctgctctcacggagtttacattcttgtaggaaatatatttcagggtttgattgtggaattcagaaaacagtcatcagtaattaagagaaaagatctgagtagtctgaaatagaagctttaagcaggtcttctcccctcacaggcctctctattcagtttatcccaaactgaattcatcacccttacccttatacagaacccagccttacaagcaagaaaactggtggtataccagatgatcccaattcactctccttcccttcactcaccaccaccaatcaagtaggccttgtagactttaccttctaagtacctctgaaatctattccctcctccacattcccactgccacaaactaggtcaagccctcatcacatcatcttttcttacctactgtagtggacactgtcatgcacagcccagattccctctcaatctagcctgaaggacttttgcctcagctttgagagtgctgtcggtgctcagccttcagctattgctatagtttggatatatgtcgctgcccaaatatcatgttgaattgtaatccccagtattggaggttgggcctggtgggaggtgattggatcatgaagatggatttttcatgagtggtttagcaccatccctttggtgctgtccttgtgatcatgagtgagccctcgtgagagctggtcatttaaaagtgtgcagcatctccccacatctctcttgctcctgctccggccatgtaatgtgcctgcttccactttgctttccaccatgtgtaaaagctccctgagccctccctagaagactgcagaaccatgagccaattaaacctcttttttttaataaattacccagttccaggtatttccttatatcaatgcaagaatgacctaacacatctgtcaatccctaatgggattgcttcagctgcagagaactgtctcactcaaggtgcatgcatctcagcccaacccaggatatagctctggagcaccctatggggtcatctgagaatgtgagtgagcctgcatcacagaacaacatggtactctgtccgtttcctttcacagatgttgatcccaaggaccctccttaataaagggcctgcatgctggaatccaatctatgatgacaagaaaatttcaatggctcctgactacctgctctaccttggctcaacccttcatcaatcccacctctgaatatctacaaaagttatatttaaaatctctgtagtttaacttttagttttattgaagtactacagtttatgaaaccatatataactcatggctcataaagaagaatggtattccttcccaacacccatcccatcaccttctgccatttatttttacatgtctaaataacatgcttatgcttctatttgttgatgtttttcagttttagatacctgtcaacttcctattatgaaagatgaaggtttagatcttttacacacacacacttttcctgtcttcattctcctgagattcttatatcacaattttcatggcttttgttgttttgattctatataacattattcacagctgatccatggtgtatactatgattacatttcttttcctgtacagttttgtttgttttccaaggttgtcttatttgcttagtttttatgtagccttcatttctatcatttgaatgtatatgtcccacacacacaaattcttatgctggaattaagactcaatgtgacagtattaagagaaagtgattaggtcacgagggctccacacttatatatgggattagtgcttttataaaagtgttcaagtgaactcactaggcccttttgcccttcatcccttccaccatgtgaaggcacagtatttgcttcttccaccatatgaggactcagcaaaaaggcaccatctttgaagcagagaacagccatcatcaaacaatgaatccactagcaccttgatcctggacttcccagcctccagactgtggttgcataaatgtctgttctttataaataacccagtctaaagtattttgttatagcaacaagaatggactcagatactctcactaatatctctccaaaccctccaccagaatatttcttctcaatatgtttaaacattcccggtcttcaatgcatttaatattttccttcttggaggcattcctcctgaggctctctctcctctttttccaatatagacagaagccttctaatcctgctcaatagtcctcatccttgtggaacacattttctaacagcttactgtaaagagtatacaggtggtaatactttgagatctgccttcctaaaaatttattctatcctcatatttgaggtactttggttggatataaaattctaggttcaaaagcattttctgtcagaattctgaagacatggctccatggtcttccaacttttaatgttgttgatgagaagacccatgctctgttgactcctgctcctttgtatttctctcttgctctgtctctctctcgctctctctctctctctgtttctctctctctctctttttctctcagcttttaggctctttatatggcattttgaaaattcatattttctgttagagtgtttttttctccttgattatgctgaacattcaacagatcattttagtctggaaacttatattctttgaacatgtctttttgtttgtgggtttgtttctaaaaatgtcctctctctctctccctcatttcctctcttctctttttctaaacatcttttattttttggatctcctggattttctttatttttctcttccatttcagtctctaggttaatttgatctaatttctagactttcctcaactctgtcttgtaactttctggttaagagttatttctgttctcttatttttaatttctgtgatcttgttctctgaaactccttgttttacaaccttctgttattgttttatgaatgtagtattctgtcttacatctcaaagcattttcatcatgaggatattttttgttttccttctacactacgccttgcattcatttcttctgagttccttctgatttgcttagttcaaattctgtctcatgttaaaaatatttcttcagatgtcttatgtccttggctgtctatttatattcaagagtgaggcactcaaatgctgattgaaagctctgtcactgtcttttctgctagttgatctcactattgattgatcaggtatgcccaggcccttttgtaaggagaccccaagtggtaatacctttagatcttttctcttgggtggattgttttactcagagaggaatacttagaactcctgccttggacagataaacctaactaccagcattccaggaagctgaatggaagaaggggaataagaggcctcagtaaattggctttaactcaacctcaccatcaattttatctgatgactctgagtctagagactctcttgtacgacttctccagagaggaaagcttcattcctgcactaaagtcatagatagatacctgagtatgtagacttgtaaagggcatctggtaggtcctattctattattctaatgctgagtgcacattaatctcctcggaaacattttttaaaactgatgcctagaccctctcctgaaccattacctctgagtttctggagtgaggtcctgacctgcatattttttaactcttctagatgaaactgatgcatactgaggattgggaaccatgaatccaactgcatcttataacaacttttaactgtttctcctattgccagccagtgtcttagcttgggctgccataacaaaatatcatggactgggtttaaacaacagaaatttattttctcacagttctggaggctagaaaactaagatcagcattctggccaacttgattttcagtaagggctcttttcctggcttgcagatggccgccttctcactatgtcctcacatggcctttcttctgtgcatgcatggagagacagtgttctctagtgtctcttctcttttttttttgagacagagtctcgttctgtcacccaggctggagtgcagtggcgcaatctccgctcactgcaagctccacctcccgagttcatgccattctcctgcctcagcctcccgagtagctgggactacaggtgcccaccaccacgcctggctaatttttttgtatttttagtagagacagggttccactgtgttagccaggatggtctcaatctcctgaccttgtgatccacctgcctcggcctcccaaagtgctgggattacaggcatgagccacctcacccggcctggtgtctcttcttataaggccagtaatcctatcagattaggaccatgcccttatgacctcatttaaccttacttgtctcctaaaggccctatctacaaatacagtcacactgggtattgggcttcaacatatgagtttggggaaaacacaattcaatttccatagcacacaatctataacagaaaacttcagactctattgcctctgacttctgattctttctgaaaatcactttgcttcttggtttttctccagcagagttttcactttctctgcactgctaagtcatttatcatgtgccccgttgcttttccagcttcctcaattttgtaaacattgtttgtccactttgggtttttttgtttttttgttttgttttgagaatgagtctcactctgtcacccaggctggagtgcaatggcacaatcttggctcactgcaagttccaccgcccaggttcacgccattctcctgcctcagcctcccaagtagctgggactacaggcgtctgccaccacacccggctaattttttgtatttttagtagagatggggtttcactgtgttagccaggatggtctcaatctcctgaccttgtgatccgcccacctcggcctcccaaatagctgggattacaggcgtgagccactgcgcctggcctttatttgactctttatggtcatgtcagtggagttttcggaggaagtagaaataaattaagtgtttgatctgtaagtttacctggtattcctcaagaatgacattgttaaactgcaacctttattatgactctccctaactaaaacccttcaacttcttcccatgacacacagaaagaactttcaaacttttaaaccagaacacccatagtggcagagaattaacatgtgtattcgtaagtgtctgggatggagtccaaaagactcaaccacttgcataaaatttctttgaaatctcacattttattttttaaatatatgcagattttgcccctgttccataatggatctgtttgttttaatataagaatattattttaaattacttggcatttaaattgcttccctttactttctttcttcaatcttcaagtcaaattgatgctttgaaaaactgatcaatttatctcattactttgtgtatccatgagacacatacagtttaagaggcacagcccttattcttaaggtgccttagtcctattgagtcctcaaaactgggcccagtagctggcttctagaagataatatacttaacaagtgtttgatgaatcaactgaactgaataatcttgtaggaagggtattatttggatggggagtagggagataggcatttccagtagatcatttagctaaaccaagctctagagggaggaatgaacacattgactagtgagtgtctgctctagatggtaccccaggctggaagtttttccaaatgctcttatctgatcttttgccctgagattccagggtagctgtgtccctgaatgagcctttcactgaaatagcttcaccctaacactcaactccatagaccatcccccaaccccatggtctcatctgctcctcacccacctctcctcattattcctgggatgattaaatctatgctacatgtccaagccaatgctagaagctacatgcttggaagtagggctgatcttacactaagggacatagtcagatgttccaacttcaagcactctcctttcaattcctttcttttctactcattcctctcaacaaaactctaactgccgaagaaatatgagtgggattggattaattagtggaggaagatcgggcatagtggctcatgcctgtaatcccagcattttgggaggccaaggcgggtggatcacctgaggtcaggagttcaaggccagcctggccaacatggtgaaacccccgtctctactaaaaatacaaaaattagtcaggcgtggtggcacacacctggaatcccagctactcaggaggctgaggcaggagaattacttgaacccgggaggcggaggttgcagtgagctgagattgtaccactgcactccagcctaagcaacagagctagactccatctcaaaaaaaaaaaaaaaaaaaaaaatggaggaagagcattctaaatttcttaggtagaatttctgaaattagagctcatggtaggcaagaaaatgatatatgtaatggaaatctttagaagtaataataatagaggatacacattaactcatttgatcctcacaaccctataaagtagctactatattattcccactttacggatcaggaacctgaagcccagaagtcacacagtgagcaaatgctggagctgagtgtgagcttagatgcacctggttccagagttaggctcttactcattatctacctcccgggatagaaatgtagcatccatctctacagctcccaggctctgagatttcacctgccaagaaaatttcaaaataatttgggggagggtagataatcacaaaattgccaagtttatattttgccaaataagcacattaaaaataaatcccattatcactatcatttcattttttaaatgacttgttaacaccgcaagatgggaagaagataatctcaggataaaagcagaaacttaaagggaataaatttagacttatgaaaaataggacagcctcaacattttccccattttgctgaagaccagtggaaattatctgggacctactgtgatccttttacagcatttggagccagagattagctcttctaatctctgtgttctcaggacacagagctgagtctctaggctgacatggagtggaaggtggggagacagacccccagcttcaaccctgggaacatcacaaggagcgaaaacctgtgtctgctcctatccaaggcattctccattctaaccaggctttccacactcccttcaactcaaaatattcctgggtcaagggcagtcagtatgtagggggaggtgggcgaagagatggggagagaaaaattaaatcaatgaagccagtgttctgagtgggctgcagacagcaaaggtctaaaattgcctgagacagaggaggacaaacacaatttgctccaggtgattgagaaaacagtggggcttgaggttctcatttttttttttttttttttaagacggagtctcactctatcaccagactggagtgcagtggttcgatcttggctcaatgcaatctccacctcccaagttcaagcgattcccctgcctcagccttctgagtagctgggattacaggtgcccaccaccacaccaggctaatttttgtatttttagtagagacagggtttcaccatattggcaaggatggtcttgattttctgaccttgtgatccacctgcctcggccttccaaagtgctgggattacaggcgtaagccaccaccccccaccaaggttctcattcttgtgcagattgttcctttctcagtctactgtgtcatcaaggatatattcaggcactgaatagttaaaggcaaggatctggtcctgaccattttatctccaaagtatttttcacgtttttcccccagctgcgtccctgactctgaccctcatcatctctttgttggaccactgaagtagctttgctccatgtccccatagcctgtccgtctttctccagactaaattttcagaaatgcaaacctgtgattcgcctcctcccatcagtatcttctcccttgtcacccaaggaatgaagttgagctctcccactcagcacacacagcaactccagcacatcacacacacacacacgcacatgcaccacactgcaccacacacacacaaacacacagtgtatggcagatgcacctgacagcaataacttaaacataccctgagactggccctgtggtctaagaagagtgctggttttggagttccaagctaagaaatccaggagtggccagcctggagcctcattccttatctatgagggtcatctaaacccttggcccattccttggaatgcagggcacacagggcatcaaggccctttatttagggttaaatggaggttgctaggttgaggttcccgggtagaggatactaagtgaaaatgctatgtaaactgcatgctttttacaaacagtagcagttctcctgtccagcccactgccactagtctgcccatatgtaaggcttcaataaaccctatgtctcattcactggctccaggtctcttctttggcctctctgacatggttccatccctactggagtgagtaggggtctgacacaacacacatacacacaggaacactgccccagcacacacacacacacacacactacacacacacatacagaaagccatacttatccacaacatcctatcccactctttgccttaaattcaatactccagaaacatagaacttcctctagatcactgaacaagcgcccctgggcctttgcacatgctgttctctctgaatattgccctctcccttttccacctaattctattcacccttgcaggcctcactcaggtctcagcttctcaaggagcccatctgagatccccttctggccaccacctctcacgtagtctgggacacgtggatgtgcctgcatgccttgtcatgatggcctctgtgatggttaataccaagtctcaactttgaaggatgcaaaatattgattctgggtgtctctgtgagggtgttgccaaaggagattaacatttgagtcagtgggccaggaaaggcaggcccacccttaatctgggtgtgcaccatctaatcagctgccagtgtggttagaatataaagaaggcagaaaaacgagaaaagacgagactggcctagcctcccagcctacatctttctcctgtgctggatgcttcctggcttcaaacactggactccaagctcttcagttttgggacttggactggctctccttgctcctcagcttgcagacagcctattgtgggaccttgtgatggtgtgagttaatacttaataaactcccctttatatatatatatatatatatatatatatatacgtatcctattagttctatcgctctagagaaccctaatacagtcactgtgctctgctgaagtcatgtgtccactgcttcctccttggggtcaaaggtcatagcgtacttagttttgcactctcaatgccagcacagcacctggcacagagtaagaacttgaatagattttttgaactgtatacttggatttagggatatggcccctgtccccaggagcttgtaaattggctggaaggatgatacacccacaggcatgaaacattctaagacaaaatacagtgctagattcaaaataaccaagagatagaacacacgatgttcccagcaattagaaggaaaaaacaatgtgagctgacattgctaagaggtttcctggaggactgaagaggaagaaatgccgtgacaattcctcagctccccaggacgggctctttctgaccccactgccctgcaccttgccccatgcctctgtcaggctggcctcaaacccccaacgaaccacggaagatgcaaaatcacacaacagcaacagcatcaggaagttccacgtttaatacttaacaacacaggaattttccaactaactccggaagatgtaaaatcacacaacagcaacagcatcaggaagttccacgtttaatacttaacaacacaggagttttccaagggccgggttattgaacttgaaataggtaaatgaatggcatgtatttatctgcaggcagcaaagataggatgcaactcttccaggaggctgggggatggaggaggcggttccagggatctgttaggagaagccctctcaacagaactcagagggtagagagcttcaggagtgggcatcccctccaaaaggctccaatgtgcatagggaggtgtgaggaaaagcatccactatcttgcaataacaatggaaaatgagtgcaagaaacattcagctcaaagactcccatccaatacccaggttggctcagctctgcgcaagaactccaagcaaaccgaagatttcatagccaaaagccagaagagctcctcagccaagaggcttctgggagtgcaggggcctaggaattggggaccacaagaaaccaggcagagggcagaggagagaaggggctaccccaagtcaaggagggaagctgaggcaccagcagcctggacttctagccacatgggttgggagatcccctgtagtctgatgtttcatgggtggggcttctggggtatggttttctaagaatctgtgagcttcagagaccacatcaaggaagagcccccccaggagtgattggttattatcccacactctcggctccatcccatggttgctatgaaaatgcccaaatgccctgaggcaagtgggtttcaaagcacagccatacaaggcccagggagtagcagccagtcacctgccaaaaccctgctctgctgttgcccttccagattcacgtaaagccttggaaggtcagatttcatatgatgccaccccacatgcttcccccactgcagcccaataaggtggccttgtttgagcagagaaaggacttcccagcctagcagttctctgagcttcattctcttcctgaaatgctactggcctcaggcactgaatcattctggtctcccttgtgcaaacccaagccaaccctcgccttcgctatttgaatgaggttgcagagaccacagctagctgcatgcaaaggatgcaggaggtggggaggtgggaagaattctgctccatccagctcccccaatatgcacgtcctccctcccaggaagctattgcctcaagtcttcttgatattgtttgacgctgaaacagtgctttgtagaaatgcttggaatgacaaggatgagagagagggaatgcagagatagatggctctaaaagtccattcccaaagagccttttgatcattctcttggctctcagctccttcacccttctctttttctgtctatcccctcccctattcctcatcccccattccgctctcagaccaggaccacaatttgtatgcacaatccttccccctttccgtggctgtgaaaaggatgaattaccttcttgatctcaacgtgatggccctgtccaagcaccccttcacctgctgtgtccgtaattgaagtgtggtctctgaatctgcagctgtcacagaggacttgacaaagagaccagagcagggtcctgcacataccaggctctccttggttgccttgagcacagaagaatgcaattttccacaccctgcacaggtggaaggccacacgacgttctcagtcactggaagtgctctttaactgggagcaaaatattagcaaagatgcccccagacttgctttcagctgcccctcatcccagctcctgcctaagaaaattctggaagactgaaagaagccatgcttgtcttccaagtctgagaaacccttggcagccttagcattggcctgtcctatgcctcagtttccccacttgtgatgtagttactccagcagaaaatccatcaacaagcaaataactgaaaatgaggacaggacatcccaaaacctcaggtgggaggctttgcctcatctcccatgcctttgcctccccatctcctatgggctgactacagagacttccctcctccactccctgcccaggtcctgaactaatcctgagacaggaagcttgtacgttggctcagtttctttctccccactataaagttttcttccttggttccaactcctaaatccaaaaatggatactaagcaggagtttcctggcctctgtcagtcctagagtttgcccacagccccacagtcagctaggctccactgtcttccacagcagtgcttcctgacagcttttgaccagggcccaggctgaagcctgggctctcatccacccctagggtctgtgctgccacaacggagcctccactcctagcgcacagcctcctccctacacagctgtgtgtgcaagagagactgtggtttggtttccccatatctgtccctctatcacgggcagctctcatgccaggcacagccctgtgcccatccctgcttaccccatgaggtcatgagcagatcaacacacatcatagcgggtttaggcctaggatggttggaagactaagtgagacaatctcagtaaaactcctatacaagaaaatgccagggccgggcatggtggctcacgcctgtaatcccagcactttgggaggctgaggcaggcagatcacttgaggtcaggagttcgagaccagcctggccaacatggtgaaaccccgtgtctactaaaaatacaaaaattaactgggcgtgatggtgtgtgcctgtaatcccagctactctggaggctaaggcaggagaatcacttgaacccgggtggcagagattgcagtgagctgagattgcaccactgcactccagcctgggtgacagagcaagactctgtctcaaaaaacagaaaaaagaaaaaaaaatgccgaccatttgtacccatggtttctggtctatcacatcttcactctcttttaccctttttaccctgatcacatgaaataaaaatatatatatatattaatggtaaggaagcatcttgagcttagagggagcaagacatgctctggtgtgtgtctagccagaatgtcttagcccgtggggacaaatgctcactgacattcaacgtacaaagagcaatgactctgagccccagcctgcttaatcacaggacatcttatcttttcaagtctccagatattcctaaggtcctcaggaattacacccacgtgtccagcacttcccagttccagtgggcacccctcgcatggtgctctaggggttggcatcccagagcagcaactctgcagcatctgggttatatcaaagttcaccatccaaggatggactgagaacacccatcacggtgctgagcttataacccaggccagtgggcccagaatagcttctctgtctgagattcagtgctgatccatcctccatatcctgggtgcccagatccagggcttctcatttaaaagggacagtgataactcttccagtccttaggcctttgtgctaatttttctatagcagggtagtctgtgcctcagtttccacttccagcccaaagggaagatcaaacctcatgctcttgcgtcctctgtttctattttcctgaaagcagctcccaacctccccaaactctcaccatcatgaccatgtatacactgacatcattgtgtgtataagaaaaagcaagaattcaggcaaagtaaaatataatatttgccactcagcttgtccctcattcactgaagccctgccaagaaccatgcgcccccacaatcaccagtagtaaaatgttcctaaaaagaacatttatctttccaggctttacctctgcgttgagtcaacactgccgcctcccacccctacctggttccccagcgtgggtggaactgaaggggccattcagggggtcttgcagaacaaaggattaatcttctccaaaataatgttaaagttttcatctatagctaggaaacaaatgcaagcaattttccaatgataaatttcctggcttctacactcaaattgtaaaagtcttaaagccatggcacccacttccatgtgacacttgtaaatttccagaccatgatgagagtcatgggtagaaagggcaccacagaggagactcaagctccagccccagccctttctctaactggcttcgggtaagaacactgtccaggttcctcatctgtgagtcgaggggattcagctagatttctaaggattgcagagctccaatattctagcgttgcgctatcattcatgataagtaattataactaagacaggatttggccttgacaccagcatctgaagcatacatgagatatctctgttattctttcccaaagcagaaatggtgctctgttcttgcagaggatcaggaagagatggcagtgagccaacagatgttcctggagtatctactgcatgccagaccacgtgctgggtgctggggtacacagtgaccagagaagacatgatcagcatagaactgacaaccaaagaagttatggctttcagggatctttcaattggtaggagaaacttacactaaataaatgcatatagccataggttacggaatgcatcgcatccccctcaaattaatttgttgaggccctaagcccaatgtgactgtatttggagatagggcctttggggaggtaattaaggttaaatgaggtcatatgactggtgtccttataagaataggaagaaagaccagagcttgctatctctgcatgtacaaagaaaaggggttatgagagcacacagagaaaaggcagccatctgcaagcaagaaagagagctgtcaccagaaaccacatatgctggcaccttgatcgtgaacttatggtttccaaaagtatgagaaaaatcaatgtttttcagttacccaatctgcagtattttgttatggcagcccaagctgaccaatacaccatgtttcatcaaatccaggacactattgaccttgtgacacaccattgtcttatgtctactgaaaaaaaaaaaaggggggggccctgccaattaaacacaattacttcttatcacttagaactcttacacttattgaaaaactcttttagaatcatttagttttgtgttgctcttatacaggcaaaaaggggaataaaagcaaaataaattaattacactgtccctaaaacttcttattcagtgtcaaaggcttctgaatcactttccaactcagacttgaaaatggcaccacggatggatgatggatgaggctgtattttctaaaagtttgctccactattgcttccaagactttcttccaagttcttgacattcatcatacaaacggatgttgatgcttccatgcttgcctgtgatacacaattcttgcacactaatgtaactgtaacatagcttgatctccttgtggactctttctttctttgtccttatattaatctgctcaggctgccataacaaaatgccacagcctgggtggcttaaacaacagagctttattttgtcacaattctggggaatgaagttcaagatcaaggtacaggcagctttggtttctcctgaggcctctctccttggcttgcaaatgaccaccttcctgctgcatccttacatggcctttcctctgtgctcacacatcccttgtgtctcttgttgcaaggacaccagtcatgttggatgagggctctatccatatgaccttatttaaccttaattacctccctcaaaggccctcttttcaaatacagtcacattgggggttagagctccaacatgtgactttaagggggacacaattcaggctacaacagtcttgtaaagcattttgttgtcactttgcaagagaatagtgatcttatctttcgaataataaaaaatttgctttgcttgctagcatcaaattgataccctgctattccgttttctttctatataaactttttgtttcggtaccaaattagagtgatattgttttttaagaggtattctaaatataaactaaaccccagatatgcaatgtcaatcatgcacctaactccactggagggacgacaacataagtacccatgaccaagtctgtgcatgctcagacaatgatcacagcagtcaatgtggctgtccagcccacagcatcataagatagcatttaaaagtgagacacatccccctttcagaaatgttaaatgtggggaaatgtgtgtgtgttttagatgaaatatggtaaaataaataaataaataaattaggatatccatgtaattcttgtgcagtttgagtttttaataaatttgcttctatataatatataagcaaattgcaaagtgtgacagaaaatgaatttactgaagatttcaatgacatttttaatgatttatttgttctaatttctttctttaattttctaggtaataaacccttctgtatacagaatggttctatccaaatatatctaaaatgatgctggatatgtcgaaagccaacatttctgtaattaaatatagtaaattatgattaaatttcctctattttccatctagcagtttgtattacagaaataaatgtattaaaattcctaacagcatacaaaccttagggtaaccctgtatagtattaagtgattgattacaagtctacagaatgctgggatgaacagggttgcccttaagaaagaatttctcaagctgagacccagaaggtgagttaggagtcagccagggagaagggatattccaaggagaaggaacagcatgcacaggggcctggagagagaaactagggaggaggcagacagacttgaagttgagggcgagggaggggggaacgacagggcacagagcagagatacaggcagaggccttcctgggcccacctcaccacttctaggcacatcccagagtgcaagaaggttgctcactgcttcagtttttataacagcaaaagattacaaacaatctcaacgtttcatccataaggggctggttaaagaaactacggttcacccaaacagaaatttttagaaagttccaaaaaaaaccaacatggaactctttattgctatgcagtgatctccaagacaaattaagtgctagatgcaaaaggtgctagatagaaagtgctggatgcaaaacagtgagtatgatacgatataatttgtgttaaaaaattaatttacacatgcttatatgtgctagactatttcttgaaggatacacaagaaattaaaagggctggttacctccagagaagggtattaggtggctggggatggggtgggagggagaatttcaatggtctgccattgaatcttttcagacctgcaggaggaggagggggaagaagaaagatgttttaagtggaagggcagctcatgtaagactgtggctctgtttgtgggaaggcttgcatgtggacaggtaatgatgaagctcctccatgttccttcagcttcctgcaggatcctgtctgtctggtattgtttttctgctgtttcacacagagatgctctttgagaaagatcataaactcctcaagggcaggaatcttcaagtgcaagttcagagcccccacagtgcctaacacacacgtgaaacacagcaaagttgtcttaattccagccgccaggtgtgctgactcacttgaccccccagcccccaccccacacgaagcagcctctagagtctgccccaaacccaaatgctgcataatcaagctggaggaattccctcctcctagaaattccagcccagtctcagaggccgcattagaactgctctttgtggttaaaatgactttcacaggcaccaaggggaagggtttccaaactgagggttcacaatccaccagtaagttgtgaaatcaatttggtgatccaacaagccttttttaaaaagaatgagggcctggcgaggtggatcacacctgtaattccaggactttgagaggccaaggtgaagattgtttgaggacaggagttcaagaccagtctcagcaacacagcaagaccccatctctataaaaaaattttaaaaaattacccaggtgtaatggcccatgcttatagttcctgatactggggaggctgaggcagaaggatcgcttgagcccaggagtttgaggctgcagtgatctaagatcgcaccactacactccagcctgggtgaaaggagaccctgtctcttaaaaaaaaagaatggaaattttcaaaagtcagaatatatcacacactagtaaaaataagtattattttgtgaaaatgtttaatttcaaatatgtgtgtggatagtgggtcatcggtaaaatatatttattaccgtgggttgcagccaaaagtgtttgaaaggcagtggcctagaggagtgagtgagcaaatggctccagagttgagcaaagcttagttcaaaccccacatctatgattttgtctccctggcaggtgacttaacctcctctcatggtacaatggagacagtagcaacgcccacctcatgggacggttgcaaggtgcttaggcttagcttgaaatcttggcttaacacttgataaatggttagcactcaagaaacattcattatcactatcacaaccaagaaatatgcccttcgtcttgctcaagaatctctggcaccaaagcaaacaatagacttggtcgtggcctgtgttcctggctgccccatggctcttctgcctggcagcttctgcccagtgtcctccttctcactccacagggagcaattggctccacagcttcctgcctcttcaccatcaaaggggctgggtgaccagaaaggcgcatttcaattcaggggagaacattactttactctaataggacatttgctatcccagccccctttcagcattggttccagggaaatagatggtcccagccactgtaattccttcgtgatatatttaaagaggaagatgatgaaggaaataatggcagtcgatctgtggttggaaagaatatatgatgtgcatgccccgtccaaaattaatgatgaatcaatatctgagaggcagagaaagtgctttattaggacctttgacaaaaaggacaattaggaccttgagacaaaaatctcaaggcccacctccctctctctctcatacttcccaaaccaactgccaaccctgtgtgcccagctcaggtacaggtcaagagagatgggcacagctgaaagcctgagggtattggagagaccaacagatgtttcccctcgggttaggaccacacccagtggctctgggtcaggaagcactgggatgccttctcaggtgtgtcagcttagtttgcagagctgagtgtgggccacaggggcgagccacctgttactaacgatgcccattaagaacctacaatgtaaccagatgtcaagtttcatgcagccgcttcctttgccctcatttcatggtcccagtctgatatggtttggctctgtgtccccacccaaatatcatcttgaattgtaatcctcataatcctcacatatcgagggaggagcctggtgggaggtgattggatcgtgggagcagttttccgcatgctgttctcatgacagtgagttcttatgagacttgatggttttacaagtgtttgacagctcctccttcacgtgcgctgtctctcctgctgccttgtgaagaaggtgccagcttccctttctgccatgattgtaagtttcctgaggcctccccagccatatggaactgtgagtcaattaaacctcttttcattataaattacccagtcttggttgtttctttatagcagtgtgaaaatggactaatatacagtttctgtaagaatactgggagaggatcttaggcagctgtggctgctatggcccactggtaggggctcatcttatgagtaaagaaattcagatgtagagttgttgaatgcataaaactagactggaactaggacccaattcccaagctgctgccggttccacagtctcacagacacaagttgggaagagcacaaagtgatgggcacacgtaaggtggcattaccatcaagggaagcgaaagcagtaagagctagaatgattggtcagagcagtgaggaagagaacaggactgtaaagagagaggagccagagacaggcttgattagaaactcaggactgaatttggtgcttgagccagtaccttaaattccaaggtcagaaggctttgtgtggatctgaggggtcatggacatttgcattcctgctgcttgccgccccagcagctggcctgatttccatttctaacagtggcacttgctgtggaggtacagtatattatggactaattaaggctgttaatgatagtggcaatccattaagtgatctacggtattattctgatctttctctgtcacctcctttcatcaggccattaaggtgacaagcttcatagaacacactaatctcccctctgtcagtcccttggtgtttttttccctggaagagctacggactctctcgggatgagtcatccgaggatacagctgaagggctggactcaccaagctcctcctccaccctcagtctcttccactcagaacacctgggctcatgggaagtctcttttgtattccctccctgttatggactgaatgtttctggctccctaaatttcctatgttgaatccctaatctccgatgtggtggtatttggagatggggcctttggtagctgtttaggtttagatacggtcatgacagcagggtcccagtgatggaattagtgtccttatgagaagaggaagagagaccagagtgctctctctgccctgtgaggacacagtgaggatggtggccatgtgcaagccagcaagagggccctcaccaggaaccaatcctactgataccttgctcttggccttcctagcccccagaactttgggaaatcaatgcctgttgtttaggccactcagtctgagccctactggtgggctcatcttatgaaagaggatatttgagatgtagagttgttgaatgcatgaaactaggctggaactaggacccaattcccaagccactgccagttccacagtctcacagacacacggccacacatacgaacacacactgtcatacactcacaaacacatgctatcatatacacacacatgcattcacacgtacaccaacatacacacacatgcagtcacacacatatacaaacacacgctgtcatacactcacaaatacccacatgctatcatatacacacatacactcacacatacaccaacatacacacatacacgcagtcacacacatatacattcacaaacacatgctgtcatacattcacaaacacccacatgctatcatatacacgcatatacactcacacatacactgacttacacacatgcagtcacacatatatatacattcacaaacccacagtcatacattcacaaacacccacatgctatcatatacacacatatacactcacacatacactgacatacacacagacatgcagtcacacatatatatacattcacaaacccacactgtcatacattcacaaacacccacatgctatcatatacacacatatacactcacacatacactgacatacacacacacatgcagtcatgcacatatacactctcaagcacacactgtcatacaatcacactatcatacacatatgcactcacacacttacatacacagtcacacatatactcacatgtatattcatgaacacacacttccatacactcaaaaacacatgctatcatatacacacgtacactcacatactcacacatatgcagtcacacacatgcatatacattcacaaacacatgctgttatccactcacaaacacccacatgctatcatacacacatacacactcatacactcacatacacacagtcacacatatactcacatacacactcacaaacacacacagtcacaatatactcacatacattcacacaagcaattacacacatacatatacactcacaaacactatcatatacacacatatacacacacagtcacacacatacacatacactcaaaatatacactcataaacacacactatcatatacacacatacactcacacacatccacattcttccatatatactcacgaacacacactgtcatacactcacactcatacacttacatacacattcacacacagtcacatatatactcacataaacactcatgaacacacagtcatatacccacaaacacacatatactcacacacacacagtcatatatatactcacatatacactcatgcacacacacaaactcacaaactcagtgtcatatacacatatacacacatatgcactcacacatacactcacgtacacacacacttatgcatacattcagtcacacatatactcatgtacactgtgtcacacacacatatgcatacacttacacactcacacatcgtgtatgtccttctaagcacagaaacgctttccatttccaacagtatcaataattcctgattactgagactagtgacttacagaaccttccctttttccaactcttaccaatttttcagtgacataaaatatagaatttggccatttcccatggggcttcagccaagggacatcactaagagctgtatctcagctttcctctgccttcacactctcaacagtaatgctgctcagtatccccagtgatccctaatgagggggctcctccgcccaatgctttttaccttttcggggtaattaaagcagaagcattcaaggtttcagtccccatgttccctcctcaatccagctccagaggggaaatactggtctgattgggctgtgtcccaaaacgctgggccacgctactagtgggcaagatctccatgcattaaggtctccatgtggtctgcatctcat

SEQ ID NO: 2 - DNA, 13 bp, Homo sapiens
ggtcctcgcctcc

SEQ ID NO: 3 - DNA, 13 bp, Homo sapiens
ggtcctagcctcc

SEQ ID NO: 4 - DNA, 13 bp, Homo sapiens
gtttgccgtgtcg

SEQ ID NO: 5 - DNA, 13 bp, Homo sapiens
gtttgctgtgtcg

SEQ ID NO: 6 - DNA, 13 bp, Homo sapiens
tcccaaactcctg

SEQ ID NO: 7 - DNA, 13 bp, Homo sapiens
tcccaacctcctg

SEQ ID NO: 8 - DNA, 51 bp, Homo sapiens
aggcgccaacagggagcaaggtcctmgcctcctggcatcggattgtttgtg

SEQ ID NO: 9 - DNA, 51 bp, Homo sapiens
atgttggtgcaccatgtgtgtttgcygtgtcggtgcacataagcagacaga

SEQ ID NO: 10 - DNA, 51 bp, Homo sapiens
tctgagtgaatcttcaaaatcccaamctcctgttcacaaatccagaagtta

SEQ ID NO: 11 - DNA, 51 bp, Homo sapiens
tggtctctgcccaggagctgccctgyaggatttccaggcccgggcaaacca

SEQ ID NO: 12 - DNA, 51 bp, Homo sapiens
agggaaggcaggtgcccatgatcacrgagatagtggtagagcccagatcta

SEQ ID NO: 13 - DNA, 51 bp, Homo sapiens
cttcagcattcaggtcataaaagtgrtaagaataagctctttgctcattac

SEQ ID NO: 14 - protein, 6 aa, Artificial Sequence
  Description of Artificial Sequence: Synthetic 6xHis tag
HHHHHH
